(19) United States
(12) Patent Application Publication
(10) Pub. No.: US 2016/0304898 A1
(43) Pub. Date: Oct. 20, 2016

(54) Pesticidal Genes and Methods of Use

(71) Applicant: AgBiome, Inc., Research Triangle Park, NC (US)

(72) Inventors: Jessica Parks, Raleigh, NC (US); Kira Bulazel Roberts, Bahama, NC (US); Rebecca E. Thayer, Morrisville, NC (US)

(73) Assignee: AgBiome, Inc., Research Triangle Park, NC (US)

(21) Appl. No.: 15/097,860

(22) Filed: Apr. 13, 2016

Related U.S. Application Data
(60) Provisional application No. 62/149,164, filed on Apr. 17, 2015.

(51) Int. Cl. C12N 15/82; A01N 63/02; A01N 63/00; C07K 14/195; C12N 9/16; C07K 14/325; C07K 14/32

(52) U.S. Cl. CPC C12N 15/8286; C07K 14/325; A01N 63/02; C07K 14/32; C07K 14/195; C12N 9/16; A01N 63/00; C12Y 301/04011

(57) ABSTRACT

Compositions having pesticidal activity and methods for their use are provided. Compositions include isolated and recombinant polypeptides having pesticidal activity, recombinant and synthetic nucleic acid molecules encoding the polypeptides, DNA constructs and vectors comprising the nucleic acid molecules, host cells comprising the vectors, and antibodies to the polypeptides. Nucleotide sequences encoding the polypeptides can be used in DNA constructs or expression cassettes for transformation and expression in organisms of interest. The compositions and methods provided are useful for producing organisms with enhanced pest resistance or tolerance. Transgenic plants and seeds comprising a nucleotide sequence that encodes a pesticidal protein of the invention are also provided. Such plants are resistant to insects and other pests. Methods are provided for producing the various polypeptides disclosed herein, and for using those polypeptides for controlling or killing a pest. Methods and kits for detecting polypeptides of the invention in a sample are also included.

### CROSS REFERENCE TO RELATED APPLICATION

[0001] This application claims the benefit of U.S. Provisional Application Ser. No. 62/149,164, filed Apr. 17, 2015, the contents of this application is herein incorporated by reference in its entirety.

### FIELD

[0002] The invention is drawn to methods and compositions for controlling pests, particularly plant pests.

### REFERENCE TO A SEQUENCE LISTING SUBMITTED AS A TEXT FILE VIA EFS-WEB

[0003] The official copy of the sequence listing is submitted electronically via EFS-Web as an ASCII formatted sequence listing with a file named AgB011.US_seq_listing.txt, created on Apr. 12, 2016 and having a size of 1.11 MB and is filed concurrently with the specification. The sequence listing contained in this ASCII formatted document is part of the specification and is herein incorporated by reference in its entirety.

### BACKGROUND

[0004] Pests, plant diseases, and weeds can be serious threats to crops. Losses due to pests and diseases have been estimated at 37% of the agricultural production worldwide, with 13% due to insects, bacteria and other organisms.

[0005] Toxins are virulence determinants that play an important role in microbial pathogenicity and/or evasion of the host immune response. Toxins from the gram-positive bacterium Bacillus, particularly Bacillus thuringiensis, have been used as insecticidal proteins. Current strategies use the genes expressing these toxins to produce transgenic crops. Transgenic crops expressing insecticidal protein toxins are used to combat crop damage from insects.

[0006] While the use of Bacillus toxins has been successful in controlling insects, resistance to Bt toxins has developed in some target pests in many parts of the world where such toxins have been used intensively. One way of solving this problem is sowing Bt crops with alternating rows of regular non Bt crops (refuge). An alternative method to avoid or slow down development of insect resistance is stacking insecticidal genes with different modes of action against insects in transgenic plants. The current strategy of using transgenic crops expressing insecticidal protein toxins is placing increasing emphasis on the discovery of novel toxins, beyond those already derived from the bacterium Bacillus thuringiensis. These toxins may prove useful as alternatives to those derived from B. thuringiensis for deployment in insect- and pest-resistant transgenic plants. Thus, new toxin proteins are needed.

### SUMMARY

[0007] Compositions having pesticidal activity and methods for their use are provided. Compositions include isolated and recombinant polypeptide sequences having pesticidal activity, recombinant and synthetic nucleic acid molecules encoding the pesticidal polypeptides, DNA constructs comprising the nucleic acid molecules, vectors comprising the nucleic acid molecules, host cells comprising the vectors, and antibodies to the pesticidal polypeptides. Nucleotide sequences encoding the polypeptides provided herein can be used in DNA constructs or expression cassettes for transformation and expression in organisms of interest, including microorganisms and plants.

[0008] The compositions and methods provided herein are useful for the production of organisms with enhanced pest resistance or tolerance. These organisms and compositions comprising the organisms are desirable for agricultural purposes. Transgenic plants and seeds comprising a nucleotide sequence that encodes a pesticidal protein of the invention are also provided. Such plants are resistant to insects and other pests.

[0009] Methods are provided for producing the various polypeptides disclosed herein, and for using those polypeptides for controlling or killing a pest. Methods and kits for detecting polypeptides of the invention in a sample are also included.

### DETAILED DESCRIPTION

[0010] The present inventions now will be described more fully hereinafter with reference to the accompanying drawings, in which some, but not all embodiments of the inventions are shown. Indeed, these inventions may be embodied in many different forms and should not be construed as limited to the embodiments set forth herein; rather, these embodiments are provided so that this disclosure will satisfy applicable legal requirements. Like numbers refer to like elements throughout.

[0011] Many modifications and other embodiments of the inventions set forth herein will come to mind to one skilled in the art to which these inventions pertain having the benefit of the teachings presented in the foregoing descriptions and the associated drawings. Therefore, it is to be understood that the inventions are not to be limited to the specific embodiments disclosed and that modifications and other embodiments are intended to be included within the scope of the appended claims. Although specific terms are employed herein, they are used in a generic and descriptive sense only and not for purposes of limitation.

### I. Polynucleotides and Polypeptides

[0012] Compositions and method for conferring pesticidal activity to an organism are provided. The modified organism exhibits pesticidal resistance or tolerance. Recombinant pesticidal proteins, or polypeptides and fragments and variants thereof that retain pesticidal activity, are provided and include those set forth in SEQ ID NOs: 1-229. The pesticidal proteins are biologically active (e.g., pesticidal) against pests including insects, fungi, nematodes, and the like. Nucleotides encoding the pesticidal polypeptides, including for example, SEQ ID NOS: 1, 2, 3, 4, 5, 6, 7, 8, 9, 10, 11, 12, 13, 14, 15, 16, 17, 18, 19, 20, 21, 22, 23, 24, 25, 26, 27, 28, 29, 30, 31, 32, 33, 34, 35, 36, 37, 38, 39, 40, 41, 42, 43, 44, 45, 46, 47, 48, 49, 50, 51, 52, 53, 54, 55, 56, 57, 58, 59, 60, 61, 62, 63, 64, 65, 66, 67, 68, 69, 70, 71, 72, 73, 74, 75, 76, 77, 78, 79, 80, 81, 82, 83, 84, 85, 86, 87, 88, 89, 90, 91, 92, 93, 94, 95, 96, 97, 98, 99, 100, 101, 102, 103, 104, 105, 106, 107, 108, 109, 110, 111, 112, 113, 114, 115, 116, 117, 118, 119, 120, 121, 122, 123, 124, 125, 126, 127, 128, 129, 130, 131, 132, 133, 134, 135, 136, 137, 138, 139, 140, 141, 142, 143, 144, 145, 146, 147, 148, 149, 150, 151, 152, 153, 154, 155, 156, 157, 158, 159, 160, 161, 162, 163, 164, 165, 166, 167, 168, 169, 170, 171, 172, 173, 174, 175, 176, 177, 178, 179, 180, 181, 182, 183, 184, 185, 186, 187, 188, 189, 190, 191, 192, 193, 194, 195, 196, 197, 198, 199, 200, 201, 202, 203, 204, 205, 206, 207, 208, 209, 210, 211, 212, 213, 214, 215, 216, 217, 218, 219, 220, 221, 222, 223, 224, 225, 226, 227, 228, 229 or active fragments or variants thereof, can be used to produce transgenic organisms, such as plants and microorganisms. In specific embodiments, nucleotides encoding the polypeptide include, for example, 5, 10, 24, 27, 40, 41, 45, 47, 49, 51, 52, 56, 59, 62, 64, 67, 77, 79, 80, 87, 92, 100, 102, 108, 111, 124, 129, 131, 132, 134, 136, 140, 148, 151, 156, 157, 159, 162, 164, 167, 172, 180, 181, 185, 199, 204, 208, 3, 7, 25, 28, 41, 49, 62, 79, 126, 132, 140, 172, 177, 180, 185, 191, or 199 or an active variant or fragment thereof. The pesticidal proteins are biologically active (for example, are pesticidal) against pests including insects, fungi, nematodes, and the like. Polynucleotides encoding the pesticidal polypeptides, including for example, SEQ ID NOS: 1-229 or active fragments or variants thereof, can be used to produce transgenic organisms, such as plants and microorganisms. The transformed organisms are characterized by genomes that comprise at least one stably incorporated DNA construct comprising a coding sequence for a pesticidal protein disclosed herein. In some embodiments, the coding sequence is operably linked to a promoter that drives expression of the encoded pesticidal polypeptide. Accordingly, transformed microorganisms, plant cells, plant tissues, plants, seeds, and plant parts are provided. A summary of various polypeptides, active variants and fragments thereof, and polynucleotides encoding the same are set forth below in Table 1. As noted in Table 1, various forms of polypeptides are provided. Full length pesticidal polypeptides, as well as, modified versions of the original full-length sequence (i.e., variants) are provided. Table 1 further denotes “CryBP1” sequences. Such sequences (SEQ ID NO: 190) comprise accessory polypeptides that can be associated with some of the toxin genes. In such instances, the CryBP1 sequences can be used alone or in combination with any of the pesticidal polypeptides provided herein. Table 1 further provides Split-Cry C-terminus polypeptides (SEQ ID NO: 21, 66, 94, 142, 150 and 165). Such sequences comprise the sequence of a downstream protein that has homology to the C-terminal end of the Cry class of toxin genes and are usually found after a Cry gene that is not full-length and is missing the expected C-terminal region.

TABLE 1
Summary of SEQ ID NOs, Gene Class, and Variants Thereof

| | | | | | | | Polypeptides | Polypeptides |
|---|---|---|---|---|---|---|---|---|
| | | | | | | | of the invention | of the invention |
| | | | | Split- | | | (and polynucleotides | (and polynucleotides |
| | Full- | Modi- | | Cry C- | | | encoding the same) | encoding the same) |
| | length | fied | CryBP1 | terminus | | | include those having | include those having |
| Gene | SEQ ID | SEQID | SEQ ID | SEQ | | Gene | the % sequence | the similarity set |
| Name | No. | No.(s) | No. | ID No. | Homologs | Class | identity listed below | forth below |
| APG00001 | 1 | 2, 3 | | | US_7923602_B2-35 | Cry | 30, 35, 40, 45, 50, 55, | 45, 50, 55, 60, 65, 70, |
| | | | | | (28.6% identity, | | 60, 65, 70, 75, 80, 85, | 75, 80, 85, 90, 95, 96, |
| | | | | | 43.8% similarity) | | 90, 95, 96, 97, 98, 99 | 97, 98, 99 |
| | | | | | AEH76817.1 | | | |
| | | | | | (28.0% identity, | | | |
| | | | | | 43.0% similarity) | | | |
| | | | | | BAC06484.1 | | | |
| | | | | | (27.9% identity, | | | |
| | | | | | 44.2% similarity) | | | |
| | | | | | C12AA_BACTU | | | |
| | | | | | (27.3% identity, | | | |
| | | | | | 44.1% similarity) | | | |
| APG00003 | 4 | 5, 6 | | | Q2HWE8_BACTU | Cry | 35, 40, 45, 50, 55, 60, | 55, 60, 65, 70, 75, 80, |
| | | | | | (34.5% identity, | | 65, 70, 75, 80, 85, 90, | 85, 90, 95, 96, 97, 98, |
| | | | | | 52.6% similarity) | | 95, 96, 97, 98, 99 | 99 |
| | | | | | US20130227743A1_74 | | | |
| | | | | | (33.9% identity, | | | |
| | | | | | 51.5% similarity) | | | |
| | | | | | Cry39Aa1 | | | |
| | | | | | (30.5% identity, | | | |
| | | | | | 46.3% similarity) | | | |
| APG00004 | 7 | 8 | | | US_7105332_B2-14 | Cry | 55, 60, 65, 70, 75, 80, | 70, 75, 80, 85, 90, 95, |
| | | | | | (52.1% identity, | | 85, 90, 95, 96, 97, 98, | 96, 97, 98, 99 |
| | | | | | 65.6% similarity) | | 99 | |
| | | | | | US_7329736_B2-2 | | | |
| | | | | | (49.6% identity, | | | |
| | | | | | 62.5% similarity) | | | |
| | | | | | B7NZX8_BACTU | | | |
| | | | | | (48.0% identity, | | | |
| | | | | | 60.3% similarity) | | | |
| | | | | | Cry8Ba1 | | | |
| | | | | | (29.4% identity, | | | |
| | | | | | 37.4% similarity) | | | |
| APG00006 | 9 | 10, 288 | | | APG00201 | Mtx | 80, 85, 90, 95, 96, 97, | 90, 95, 96, 97, 98, 99 |
| | | | | | (79.7% identity, | | 98, 99 | |
| | | | | | 88.2% similarity) | | | |
| | | | | | J8YPM2_BACCE | | | |
| | | | | | (79.0% identity, | | | |
| | | | | | 86.2% similarity) | | | |
| | | | | | US20130227743A1_100 | | | |
| | | | | | (77.5% identity, | | | |
| | | | | | 85.3% similarity) | | | |
| | | | | | APG00036 | | | |
| | | | | | (76.1% identity, | | | |
| | | | | | 83.7% similarity) | | | |
| | | | | | APG00022 | | | |
| | | | | | (75.4% identity, | | | |
| | | | | | 84.3% similarity) | | | |
| | | | | | US20130227743A1_60 | | | |
| | | | | | (44.9% identity, | | | |
| | | | | | 49.5% similarity) | | | |
| | | | | | A8LVM9_SALAI | | | |
| | | | | | (25.2% identity, | | | |
| | | | | | 39.7% similarity) | | | |
| APG00007 | 11 | 12, 13, | | | AEH76820.1 | Cry | 50, 55, 60, 65, 70, 75, | 65, 70, 75, 80, 85, 90, |
| | | 14 | | | (47.0% identity, | | 80, 85, 90, 95, 96, 97, | 95, 96, 97, 98, 99 |
| | | | | | 60.1% similarity) | | 98, 99 | |
| | | | | | BAB78602.1 | | | |
| | | | | | (44.5% identity, | | | |
| | | | | | 57.8% similarity) | | | |
| | | | | | US20100298211A1_8 | | | |
| | | | | | (44.5% identity, | | | |
| | | | | | 57.1% similarity) | | | |
| | | | | | Cry32Da1 | | | |
| | | | | | (37.0% identity, | | | |
| | | | | | 50.4% similarity) | | | |
| APG00009 | 15 | 16 | | | WP_002166885.1 | Mtx | 30, 35, 40, 45, 50, 55, | 45, 50, 55, 60, 65, 70, |
| | | | | | (26.4% identity, | | 60, 65, 70, 75, 80, 85, | 75, 80, 85, 90, 95, 96, |
| | | | | | 40.5% similarity) | | 90, 95, 96, 97, 98, 99 | 97, 98, 99 |
| | | | | | C3ICE4_BACTU | | | |
| | | | | | (25.9% identity, | | | |
| | | | | | 37.5% similarity) | | | |
| | | | | | J8Y0J8_BACCE | | | |
| | | | | | (25.9% identity, | | | |
| | | | | | 37.3% similarity) | | | |
| | | | | | WP_033690552.1 | | | |
| | | | | | (23.8% identity, | | | |
| | | | | | 34.8% similarity) | | | |
| APG00011 | 17 | 18 | | | APG00035 | Bin | 80, 85, 90, 95, 96, 97, | 90, 95, 96, 97, 98, 99 |
| | | | | | (75.9% identity, | | 98, 99 | |
| | | | | | 84.7% similarity) | | | |
| | | | | | K0FZN9_BACTU | | | |
| | | | | | (75.3% identity, | | | |
| | | | | | 85.0% similarity) | | | |
| | | | | | J8HJ33_BACCE | | | |
| | | | | | (75.1% identity, | | | |
| | | | | | 85.0% similarity) | | | |
| | | | | | US20130227743A1_6 | | | |
| | | | | | (70.0% identity, | | | |
| | | | | | 78.8% similarity) | | | |
| | | | | | Cry35Ab1 | | | |
| | | | | | (23.8% identity, | | | |
| | | | | | 39.9% similarity) | | | |
| APG00012 | 19 | 20 | | 21 | US_2013_0227743_A1_194 | Cry | 70, 75, 80, 85, 90, 95, | 80, 85, 90, 95, 96, 97, |
| | | | | | (67.2% identity, | | 96, 97, 98, 99 | 98, 99 |
| | | | | | 76.2% similarity) | | | |
| | | | | | US_8461415_B2-43 | | | |
| | | | | | (46.5% identity, | | | |
| | | | | | 53.1% similarity) | | | |
| | | | | | US_8461415_B2-42 | | | |
| | | | | | (37.1% identity, | | | |
| | | | | | 42.4% similarity) | | | |
| | | | | | Cry44Aa | | | |
| | | | | | (18.1% identity, | | | |
| | | | | | 29.8% similarity) | | | |
| APG00013 | 22 | 23 | | | WP_001036192.1 | Mtx | 90, 95, 96, 97, 98, 99 | 95, 96, 97, 98, 99 |
| | | | | | (87.5% identity, | | | |
| | | | | | 93.4% similarity) | | | |
| | | | | | WP_000163136.1 | | | |
| | | | | | (85.8% identity, | | | |
| | | | | | 93.1% similarity) | | | |
| | | | | | WP_000790613.1 | | | |
| | | | | | (59.0% identity, | | | |
| | | | | | 74.9% similarity) | | | |
| | | | | | APG00234 | | | |
| | | | | | (57.7% identity, | | | |
| | | | | | 73.3% similarity) | | | |
| | | | | | WP_003290257.1 | | | |
| | | | | | (48.6% identity, | | | |
| | | | | | 64.7% similarity) | | | |
| APG00014 | 24 | | | | WP_033694890.1 | Mtx | 35, 40, 45, 50, 55, 60, | 50, 55, 60, 65, 70, 75, |
| | | | | | (34.1% identity, | | 65, 70, 75, 80, 85, 90, | 80, 85, 90, 95, 96, 97, |
| | | | | | 45.1% similarity) | | 95, 96, 97, 98, 99 | 98, 99 |
| | | | | | US20120278954A1_22 | | | |
| | | | | | (33.1% identity, | | | |
| | | | | | 49.5% similarity) | | | |
| | | | | | AF316145_1 | | | |
| | | | | | (30.8% identity, | | | |
| | | | | | 48.4% similarity) | | | |
| | | | | | US_5308760_A-9 | | | |
| | | | | | (27.9% identity, | | | |
| | | | | | 42.3% similarity) | | | |
| APG00015 | 25 | | | | ACF35049.1 | Cyt2 | 55, 60, 65, 70, 75, 80, | 70, 75, 80, 85, 90, 95, |
| | | | | | (53.0% identity, | | 85, 90, 95, 96, 97, 98, | 96, 97, 98, 99 |
| | | | | | 67.6% similarity) | | 99 | |
| | | | | | WP_000288253.1 | | | |
| | | | | | (53.0% identity, | | | |
| | | | | | 67.6% similarity) | | | |
| | | | | | AF398463_1 | | | |
| | | | | | (50.4% identity, | | | |
| | | | | | 64.5% similarity) | | | |
| | | | | | Cyt2Bc1 | | | |
| | | | | | (49.5% identity, | | | |
| | | | | | 67.8% similarity) | | | |
| APG00016 | 26 | 27 | | | AF038048_1 | Mtx | 30, 35, 40, 45, 50, 55, | 45, 50, 55, 60, 65, 70, |
| | | | | | (26.7% identity, | | 60, 65, 70, 75, 80, 85, | 75, 80, 85, 90, 95, 96, |
| | | | | | 40.2% similarity) | | 90, 95, 96, 97, 98, 99 | 97, 98, 99 |
| | | | | | US20120278954A1_30 | | | |
| | | | | | (25.6% identity, | | | |
| | | | | | 41.7% similarity) | | | |
| | | | | | AGP18056.1 | | | |
| | | | | | (24.8% identity, | | | |
| | | | | | 40.0% similarity) | | | |
| | | | | | Cry45Aa | | | |
| | | | | | (24.2% identity, | | | |
| | | | | | 38.6% similarity) | | | |
| APG00017 | 28 | | | | US_8513493_B2-47 | Cyt | 35, 40, 45, 50, 55, 60, | 55, 60, 65, 70, 75, 80, |
| | | | | | (32.1% identity, | | 65, 70, 75, 80, 85, 90, | 85, 90, 95, 96, 97, 98, |
| | | | | | 53.1% similarity) | | 95, 96, 97, 98, 99 | 99 |
| | | | | | Cyt2Ca1 | | | |
| | | | | | (29.4% identity, | | | |
| | | | | | 40.3% similarity) | | | |
| APG00018 | 29 | 30 | | | APG00205 | Mtx | 75, 80, 85, 90, 95, 96, | 85, 90, 95, 96, 97, 98, |
| | | | | | (97.8% identity, | | 97, 98, 99 | 99 |
| | | | | | 99.0% similarity) | | | |
| | | | | | C3IAI7_BACTU | | | |
| | | | | | (71.7% identity, | | | |
| | | | | | 81.5% similarity) | | | |
| | | | | | J8HRD0_BACCE | | | |
| | | | | | (65.6% identity, | | | |
| | | | | | 74.8% similarity) | | | |
| | | | | | C3FB42_BACTU | | | |
| | | | | | (48.1% identity, | | | |
| | | | | | 63.4% similarity) | | | |
| | | | | | WP_018669999.1 | | | |
| | | | | | (48.1% identity, | | | |
| | | | | | 63.0% similarity) | | | |
| APG00019 | 31 | 32 | | | APG00272 | Mtx | 40, 45, 50, 55, 60, 65, | 55, 60, 65, 70, 75, 80, |
| | | | | | (80.2% identity, | | 70, 75, 80, 85, 90, 95, | 85, 90, 95, 96, 97, 98, |
| | | | | | 81.8% similarity) | | 96, 97, 98, 99 | 99 |
| | | | | | WP_034679607.1 | | | |
| | | | | | (38.4% identity, | | | |
| | | | | | 50.8% similarity) | | | |
| | | | | | US_8829279_B2-2 | | | |
| | | | | | (29.7% identity, | | | |
| | | | | | 46.2% similarity) | | | |
| | | | | | US_8829279_B2-61 | | | |
| | | | | | (29.3% identity, | | | |
| | | | | | 45.7% similarity) | | | |
| | | | | | US20130227743A1_66 | | | |
| | | | | | (28.9% identity, | | | |
| | | | | | 45.8% similarity) | | | |
| APG00020 | 33 | 34 | | | J8H0D9_BACCE | Mtx | 85, 90, 95, 96, 97, 98, | 85, 90, 95, 96, 97, 98, |
| | | | | | (81.1% identity, | | 99 | 99 |
| | | | | | 83.8% similarity) | | | |
| | | | | | US20130227743A1_110 | | | |
| | | | | | (46.4% identity, | | | |
| | | | | | 63.9% similarity) | | | |
| | | | | | WP_000844425.1 | | | |
| | | | | | (27.1% identity, | | | |
| | | | | | 44.0% similarity) | | | |
| | | | | | C3ICE4_BACTU | | | |
| | | | | | (27.0% identity, | | | |
| | | | | | 44.1% similarity) | | | |
| APG00021 | 35 | 36 | | | APG00091 | Mtx | 35, 40, 45, 50, 55, 60, | 50, 55, 60, 65, 70, 75, |
| | | | | | (93.6% identity, | | 65, 70, 75, 80, 85, 90, | 80, 85, 90, 95, 96, 97, |
| | | | | | 96.4% similarity) | | 95, 96, 97, 98, 99 | 98, 99 |
| | | | | | BAD22577.1 | | | |
| | | | | | (31.5% identity, | | | |
| | | | | | 46.6% similarity) | | | |
| | | | | | US_8461421_B2-102 | | | |
| | | | | | (31.2% identity, | | | |
| | | | | | 46.4% similarity) | | | |
| | | | | | US_6063756_A-3 | | | |
| | | | | | (28.4% identity, | | | |
| | | | | | 47.7% similarity) | | | |
| | | | | | Cry15Aa1 | | | |
| | | | | | (23.5% identity, | | | |
| | | | | | 37.3% similarity) | | | |
| APG00022 | 37 | 38 | | | APG00201 | Mtx | 75, 80, 85, 90, 95, 96, | 85, 90, 95, 96, 97, 98, |
| | | | | | (78.8% identity, | | 97, 98, 99 | 99 |
| | | | | | 85.9% similarity) | | | |
| | | | | | APG00036 | | | |
| | | | | | (78.8% identity, | | | |
| | | | | | 84.4% similarity) | | | |
| | | | | | APG00006 | | | |
| | | | | | (75.4% identity, | | | |
| | | | | | 84.3% similarity) | | | |
| | | | | | J8YPM2_BACCE | | | |
| | | | | | (71.8% identity, | | | |
| | | | | | 81.4% similarity) | | | |
| | | | | | US20130227743A1_100 | | | |
| | | | | | (71.4% identity, | | | |
| | | | | | 81.4% similarity) | | | |
| | | | | | US20130227743A1_60 | | | |
| | | | | | (48.9% identity, | | | |
| | | | | | 51.8% similarity) | | | |
| | | | | | WP_037788316.1 | | | |
| | | | | | (21.8% identity, | | | |
| | | | | | 35.2% similarity) | | | |
| APG00024 | 39 | 40 | | | WP_016078427.1 | Cry6 | 99 | 99 |
| | | | | | (98.3% identity, | | | |
| | | | | | 98.3% similarity) | | | |
| | | | | | WP_000240776.1 | | | |
| | | | | | (95.3% identity, | | | |
| | | | | | 97.2% similarity) | | | |
| | | | | | WP_000240775.1 | | | |
| | | | | | (94.4% identity, | | | |
| | | | | | 96.4% similarity) | | | |
| | | | | | Cry6Ba1 | | | |
| | | | | | (28.4% identity, | | | |
| | | | | | 47.9% similarity) | | | |
| APG00025 | 41 | 42 | | | K0G027_BACTU | Cry70B | 95, 96, 97, 98, 99 | 97, 98, 99 |
| | | | | | (92.9% identity, | | | |
| | | | | | 96.7% similarity) | | | |
| | | | | | ADO51070.1 | | | |
| | | | | | (92.6% identity, 96.4% | | | |
| | | | | | similarity) | | | |
| | | | | | T1WCQ4_BACTU | | | |
| | | | | | (87.6% identity, | | | |
| | | | | | 93.2% similarity) | | | |
| | | | | | Cry70Bb1 | | | |
| | | | | | (85.9% identity, | | | |
| | | | | | 92.0% similarity) | | | |
| | | | | | APG00027 | | | |
| | | | | | (56.3% identity, | | | |
| | | | | | 71.4% similarity) | | | |
| APG00026 | 43 | 44, 45, | | | R8DHS1_BACCE | Cry | 75, 80, 85, 90, 95, 96, | 85, 90, 95, 96, 97, 98, |
| | | 46 | | | (72.9% identity, | | 97, 98, 99 | 99 |
| | | | | | 84.0% similarity) | | | |
| | | | | | APG00109 | | | |
| | | | | | (69.2% identity, | | | |
| | | | | | 79.5% similarity) | | | |
| | | | | | US_7919272_B2-14 | | | |
| | | | | | (64.1% identity, | | | |
| | | | | | 76.5% similarity) | | | |
| | | | | | US20130227743A1_30 | | | |
| | | | | | (63.6% identity, | | | |
| | | | | | 72.5% similarity) | | | |
| | | | | | Cry24Ba1 | | | |
| | | | | | (27.0% identity, | | | |
| | | | | | 40.3% similarity) | | | |
| APG00028 | 47 | 48 | | | EP_1947184-8.01 | Cry | 35, 40, 45, 50, 55, 60, | 45, 50, 55, 60, 65, 70, |
| | | | | | (30.4% identity, | | 65, 70, 75, 80, 85, 90, | 75, 80, 85, 90, 95, 96, |
| | | | | | 44.2% similarity) | | 95, 96, 97, 98, 99 | 97, 98, 99 |
| | | | | | EP_1947184-6.01 | | | |
| | | | | | (29.4% identity, | | | |
| | | | | | 43.2% similarity) | | | |
| | | | | | F0PZN0_BACT0 | | | |
| | | | | | (24.4% identity, | | | |
| | | | | | 33.9% similarity) | | | |
| | | | | | Cry4Cc1 | | | |
| | | | | | (24.1% identity, | | | |
| | | | | | 35.0% similarity) | | | |
| APG00029 | 49 | | | | APG00100 | Cry | 30, 35, 40, 45, 50, 55, | 45, 50, 55, 60, 65, 70, |
| | | | | | (67.8% identity, | | 60, 65, 70, 75, 80, 85, | 75, 80, 85, 90, 95, 96, |
| | | | | | 80.5% similarity) | | 90, 95, 96, 97, 98, 99 | 97, 98, 99 |
| | | | | | AFB18319.1 | | | |
| | | | | | (26.3% identity, | | | |
| | | | | | 43.3% similarity) | | | |
| | | | | | US_5518897_A-1.01 | | | |
| | | | | | (26.3% identity, | | | |
| | | | | | 43.1% similarity) | | | |
| | | | | | US_6071877_A-7 | | | |
| | | | | | (26.3% identity, | | | |
| | | | | | 43.1% similarity) | | | |
| | | | | | Cry11Ba1 | | | |
| | | | | | (23.8% identity, | | | |
| | | | | | 37.5% similarity) | | | |
| APG00030 | 50 | 51 | | | US_8461415_B2-42 | Cry | 75, 80, 85, 90, 95, 96, | 90, 95, 96, 97, 98, 99 |
| | | | | | (72.5% identity, | | 97, 98, 99 | |
| | | | | | 85.3% similarity) | | | |
| | | | | | APG00096 | | | |
| | | | | | (72.1% identity, | | | |
| | | | | | 84.8% similarity) | | | |
| | | | | | APG00114 | | | |
| | | | | | (64.1% identity, | | | |
| | | | | | 81.1% similarity) | | | |
| | | | | | US_8461415_B2-43 | | | |
| | | | | | (61.3% identity, | | | |
| | | | | | 70.6% similarity) | | | |
| | | | | | US_2013_0227743_A1_194 | | | |
| | | | | | (42.3% identity, | | | |
| | | | | | 48.4% similarity) | | | |
| | | | | | Cry42Aa1 | | | |
| | | | | | (22.6% identity, | | | |
| | | | | | 35.5% similarity) | | | |
| APG00031 | 52 | 53 | | | APG00127 | Cry | 55, 60, 65, 70, 75, 80, | 70, 75, 80, 85, 90, 95, |
| | | | | | (99.5% identity, | | 85, 90, 95, 96, 97, 98, | 96, 97, 98, 99 |
| | | | | | 99.7% similarity) | | 99 | |
| | | | | | B7NZX8_BACTU | | | |
| | | | | | (54.3% identity, | | | |
| | | | | | 68.6% similarity) | | | |
| | | | | | B8K1J3_BACTU | | | |
| | | | | | (35.3% identity, | | | |
| | | | | | 44.7% similarity) | | | |
| | | | | | AAQ73470.1 | | | |
| | | | | | (35.0% identity, | | | |
| | | | | | 44.4% similarity) | | | |
| | | | | | Cry8Ja1 | | | |
| | | | | | (34.4% identity, | | | |
| | | | | | 43.4% similarity) | | | |
| APG00032 | 54 | 55, 56 | | | WP_019419510.1 | Cry | 45, 50, 55, 60, 65, 70, | 60, 65, 70, 75, 80, 85, |
| | | | | | (40.7% identity, | | 75, 80, 85, 90, 95, 96, | 90, 95, 96, 97, 98, 99 |
| | | | | | 55.0% similarity) | | 97, 98, 99 | |
| | | | | | K0G027_BACTU | | | |
| | | | | | (36.2% identity, | | | |
| | | | | | 53.0% similarity) | | | |
| | | | | | ADO51070.1 | | | |
| | | | | | (36.1% identity, | | | |
| | | | | | 52.9% similarity) | | | |
| | | | | | Cry70Bb1 | | | |
| | | | | | (34.5% identity, | | | |
| | | | | | 52.1% similarity) | | | |
| APG00033 | 57 | | | | APG00104 | Vip | 70, 75, 80, 85, 90, 95, | 80, 85, 90, 95, 96, 97, |
| | | | | | (84.1% identity, | | 96, 97, 98, 99 | 98, 99 |
| | | | | | 89.0% similarity) | | | |
| | | | | | APG00077 | | | |
| | | | | | (76.5% identity, | | | |
| | | | | | 84.1% similarity) | | | |
| | | | | | KEZ80024.1 | | | |
| | | | | | (65.7% identity, | | | |
| | | | | | 77.5% similarity) | | | |
| | | | | | US_6204435-4 | | | |
| | | | | | (24.2% identity, | | | |
| | | | | | 41.4% similarity) | | | |
| | | | | | Vip3Aa49 | | | |
| | | | | | (23.9% identity, | | | |
| | | | | | 40.6% similarity) | | | |
| APG00035 | 58 | 59 | | | K0FZN9_BACTU | Bin | 95, 96, 97, 98, 99 | 97, 98, 99 |
| | | | | | (90.9% identity, | | | |
| | | | | | 96.0% similarity) | | | |
| | | | | | J8HJ33_BACCE | | | |
| | | | | | (87.9% identity, | | | |
| | | | | | 94.9% similarity) | | | |
| | | | | | US20130227743A1_6 | | | |
| | | | | | (80.7% identity, | | | |
| | | | | | 86.6% similarity) | | | |
| | | | | | APG00011 | | | |
| | | | | | (75.9% identity, | | | |
| | | | | | 84.7% similarity) | | | |
| | | | | | Cry35Ac2 | | | |
| | | | | | (21.9% identity, | | | |
| | | | | | 40.7% similarity) | | | |
| APG00036 | 60 | 61, 229 | | | APG00201 | Mtx | 75, 80, 85, 90, 95, 96, | 85, 90, 95, 96, 97, 98, |
| | | | | | (79.3% identity, | | 97, 98, 99 | 99 |
| | | | | | 85.9% similarity) | | | |
| | | | | | APG00022 | | | |
| | | | | | (78.8% identity, | | | |
| | | | | | 84.4% similarity) | | | |
| | | | | | APG00006 | | | |
| | | | | | (76.1% identity, | | | |
| | | | | | 83.7% similarity) | | | |
| | | | | | J8YPM2_BACCE | | | |
| | | | | | (74.4% identity, | | | |
| | | | | | 83.7% similarity) | | | |
| | | | | | US20130227743A1_100 | | | |
| | | | | | (73.8% identity, | | | |
| | | | | | 83.1% similarity) | | | |
| | | | | | US20130227743A1_60 | | | |
| | | | | | (47.7% identity, | | | |
| | | | | | 49.3% similarity) | | | |
| | | | | | US_8461421_B2-117 | | | |
| | | | | | (22.6% identity, | | | |
| | | | | | 36.6% similarity) | | | |
| APG00040 | 62 | 63 | | | Cry54Ba1 | Cry | 35, 40, 45, 50, 55, 60, | 50, 55, 60, 65, 70, 75, |
| | | | | | (31.8% identity, | | 65, 70, 75, 80, 85, 90, | 80, 85, 90, 95, 96, 97, |
| | | | | | 45.1% similarity) | | 95, 96, 97, 98, 99 | 98, 99 |
| APG00041 | 64 | 65 | | 66 | APG00145 | Cry | 70, 75, 80, 85, 90, 95, | 80, 85, 90, 95, 96, 97, |
| | | | | | (77.4% identity, | | 96, 97, 98, 99 | 98, 99 |
| | | | | | 83.5% similarity) | | | |
| | | | | | AEH76822.1 | | | |
| | | | | | (67.0% identity, | | | |
| | | | | | 77.8% similarity) | | | |
| | | | | | J8N7T9_BACCE | | | |
| | | | | | (65.8% identity, | | | |
| | | | | | 77.7% similarity) | | | |
| | | | | | APG00130 | | | |
| | | | | | (58.4% identity, | | | |
| | | | | | 66.1% similarity) | | | |
| | | | | | X2J6C3_BACTU | | | |
| | | | | | (56.0% identity, | | | |
| | | | | | 68.9% similarity) | | | |
| | | | | | APG00140 | | | |
| | | | | | (55.7% identity, | | | |
| | | | | | 68.0% similarity) | | | |
| | | | | | Cry42Aa1 | | | |
| | | | | | (37.5% identity, | | | |
| | | | | | 52.6% similarity) | | | |
| APG00042 | 67 | 68 | | | N1LIK5_9BACI | Cry | 70, 75, 80, 85, 90, 95, | 85, 90, 95, 96, 97, 98, |
| | | | | | (67.1% identity, | | 96, 97, 98, 99 | 99 |
| | | | | | 80.8% similarity) | | | |
| | | | | | N1LSG2_9BACI | | | |
| | | | | | (31.2% identity, | | | |
| | | | | | 49.1% similarity) | | | |
| | | | | | N1LPH2_9BACI | | | |
| | | | | | (29.9% identity, | | | |
| | | | | | 46.0% similarity) | | | |
| | | | | | Cry42Aa1 | | | |
| | | | | | (25.4% identity, | | | |
| | | | | | 37.1% similarity) | | | |
| APG00043 | 69 | 70 | | | US_2013_0227743_A1_178 | Cry | 30, 35, 40, 45, 50, 55, | 45, 50, 55, 60, 65, 70, |
| | | | | | (27.1% identity, | | 60, 65, 70, 75, 80, 85, | 75, 80, 85, 90, 95, 96, |
| | | | | | 42.2% similarity) | | 90, 95, 96, 97, 98, 99 | 97, 98, 99 |
| | | | | | WP_017762581.1 | | | |
| | | | | | (25.4% identity, | | | |
| | | | | | 37.2% similarity) | | | |
| | | | | | WP_017762616.1 | | | |
| | | | | | (24.0% identity, | | | |
| | | | | | 39.6% similarity) | | | |
| | | | | | WP_017762619.1 | | | |
| | | | | | (21.9% identity, | | | |
| | | | | | 35.2% similarity) | | | |
| APG00044 | 71 | 72 | | | J8HQM8_BACCE | Cry | 55, 60, 65, 70, 75, 80, | 65, 70, 75, 80, 85, 90, |
| | | | | | (50.4% identity, | | 85, 90, 95, 96, 97, 98, | 95, 96, 97, 98, 99 |
| | | | | | 64.3% similarity) | | 99 | |
| | | | | | BAD35166.1 | | | |
| | | | | | (44.6% identity, | | | |
| | | | | | 58.4% similarity) | | | |
| | | | | | BAD35163.1 | | | |
| | | | | | (42.2% identity, | | | |
| | | | | | 55.5% similarity) | | | |
| | | | | | Cry73Aa | | | |
| | | | | | (38.4% identity, | | | |
| | | | | | 51.8% similarity) | | | |
| APG00045 | 73 | 74, 75, | | | APG00110 | Cry | 50, 55, 60, 65, 70, 75, | 65, 70, 75, 80, 85, 90, |
| | | 76 | | | (61.0% identity, | | 80, 85, 90, 95, 96, 97, | 95, 96, 97, 98, 99 |
| | | | | | 71.8% similarity) | | 98, 99 | |
| | | | | | R8DLK4_BACCE | | | |
| | | | | | (49.8% identity, | | | |
| | | | | | 62.7% similarity) | | | |
| | | | | | US_8461421_B2-100 | | | |
| | | | | | (30.0% identity, | | | |
| | | | | | 47.3% similarity) | | | |
| | | | | | R8EX84_BACCE | | | |
| | | | | | (29.2% identity, | | | |
| | | | | | 42.7% similarity) | | | |
| | | | | | Cry70Ba1 | | | |
| | | | | | (22.5% identity, | | | |
| | | | | | 38.0% similarity) | | | |
| APG00047 | 77 | | | | J8F3U1_BACCE | Bin | 35, 40, 45, 50, 55, 60, | 45, 50, 55, 60, 65, 70, |
| | | | | | (33.1% identity, | | 65, 70, 75, 80, 85, 90, | 75, 80, 85, 90, 95, 96, |
| | | | | | 43.7% similarity) | | 95, 96, 97, 98, 99 | 97, 98, 99 |
| | | | | | US_8829279_B2-4 | | | |
| | | | | | (23.8% identity, | | | |
| | | | | | 40.1% similarity) | | | |
| | | | | | US_8829279_B2-39 | | | |
| | | | | | (23.2% identity, | | | |
| | | | | | 37.4% similarity) | | | |
| | | | | | Cry35Ab1 | | | |
| | | | | | (19.3% identity, | | | |
| | | | | | 31.6% similarity) | | | |
| APG00049 | 78 | 79 | | | WP_003290257.1 | Mtx | 95, 96, 97, 98, 99 | 95, 96, 97, 98, 99 |
| | | | | | (91.5% identity, | | | |
| | | | | | 93.8% similarity) | | | |
| | | | | | WP_008180054.1 | | | |
| | | | | | (55.7% identity, | | | |
| | | | | | 69.0% similarity) | | | |
| | | | | | WP_000790613.1 | | | |
| | | | | | (55.0% identity, | | | |
| | | | | | 67.6% similarity) | | | |
| | | | | | WP_016099228.1 | | | |
| | | | | | (54.6% identity, | | | |
| | | | | | 69.6% similarity) | | | |
| APG00050 | 80 | | | | CAJ86541.1 | Bin | 35, 40, 45, 50, 55, 60, | 45, 50, 55, 60, 65, 70, |
| | | | | | (31.3% identity, | | 65, 70, 75, 80, 85, 90, | 75, 80, 85, 90, 95, 96, |
| | | | | | 44.4% similarity) | | 95, 96, 97, 98, 99 | 97, 98, 99 |
| | | | | | CAJ86542.1 | | | |
| | | | | | (31.0% identity, | | | |
| | | | | | 44.8% similarity) | | | |
| | | | | | P12964.1 | | | |
| | | | | | (28.9% identity, | | | |
| | | | | | 40.4% similarity) | | | |
| | | | | | Cry36Aa1 | | | |
| | | | | | (21.0% identity, | | | |
| | | | | | 34.9% similarity) | | | |
| APG00051 | 81 | 82 | | | C3ICE4_BACTU | Mtx | 35, 40, 45, 50, 55, 60, | 50, 55, 60, 65, 70, 75, |
| | | | | | (31.6% identity, | | 65, 70, 75, 80, 85, 90, | 80, 85, 90, 95, 96, 97, |
| | | | | | 47.8% similarity) | | 95, 96, 97, 98, 99 | 98, 99 |
| | | | | | J8Y0J8_BACCE | | | |
| | | | | | (31.6% identity, | | | |
| | | | | | 47.8% similarity) | | | |
| | | | | | WP_033690552.1 | | | |
| | | | | | (29.9% identity, | | | |
| | | | | | 44.7% similarity) | | | |
| | | | | | J7XTF7_BACCE | | | |
| | | | | | (29.9% identity, | | | |
| | | | | | 44.4% similarity) | | | |
| APG00053 | 83 | | | | WP_017762616.1 | Cry | 30, 35, 40, 45, 50, 55, | 45, 50, 55, 60, 65, 70, |
| | | | | | (28.3% identity, | | 60, 65, 70, 75, 80, 85, | 75, 80, 85, 90, 95, 96, |
| | | | | | 44.2% similarity) | | 90, 95, 96, 97, 98, 99 | 97, 98, 99 |
| | | | | | US20130227743A1_200 | | | |
| | | | | | (22.7% identity, | | | |
| | | | | | 38.9% similarity) | | | |
| | | | | | WP_017762581.1 | | | |
| | | | | | (22.5% identity, | | | |
| | | | | | 35.6% similarity) | | | |
| | | | | | WP_017762619.1 | | | |
| | | | | | (22.4% identity, | | | |
| | | | | | 34.2% similarity) | | | |
| APG00054 | 84 | 85 | | | APG00068 | Cry32 | 65, 70, 75, 80, 85, 90, | 75, 80, 85, 90, 95, 96, |
| | | | | | (68.4% identity, | | 95, 96, 97, 98, 99 | 97, 98, 99 |
| | | | | | 77.4% similarity) | | | |
| | | | | | ADK66923.1 | | | |
| | | | | | (59.6% identity, | | | |
| | | | | | 69.3% similarity) | | | |
| | | | | | Cry32Ab1 | | | |
| | | | | | (56.9% identity, | | | |
| | | | | | 67.1% similarity) | | | |
| | | | | | APG00185 | | | |
| | | | | | (50.1% identity, | | | |
| | | | | | 61.2% similarity) | | | |
| | | | | | US_8461421_B2-38_1 | | | |
| | | | | | (60.5% identity, | | | |
| | | | | | 70.5% similarity) | | | |
| | | | | | US_8461421_B2-39_1 | | | |
| | | | | | (60.4% identity, | | | |
| | | | | | 71.0% similarity) | | | |
| APG00055 | 86 | 87 | | | US_8796026_B2-6 | Mtx | 85, 90, 95, 96, 97, 98, | 90, 95, 96, 97, 98, 99 |
| | | | | | (80.0% identity, | | 99 | |
| | | | | | 86.5% similarity) | | | |
| | | | | | WP_000875423.1 | | | |
| | | | | | (78.6% identity, | | | |
| | | | | | 86.2% similarity) | | | |
| | | | | | US_8796026_B2-4 | | | |
| | | | | | (77.8% identity, | | | |
| | | | | | 87.6% similarity) | | | |
| | | | | | US_8796026_B2-8 | | | |
| | | | | | (77.6% identity, | | | |
| | | | | | 86.3% similarity) | | | |
| | | | | | APG00174 | | | |
| | | | | | (70.3% identity, | | | |
| | | | | | 80.5% similarity) | | | |
| APG00057 | 88 | 89 | | | N1LT74_9BACI | Cry | 50, 55, 60, 65, 70, 75, | 65, 70, 75, 80, 85, 90, |
| | | | | | (47.0% identity, | | 80, 85, 90, 95, 96, 97, | 95, 96, 97, 98, 99 |
| | | | | | 63.0% similarity) | | 98, 99 | |
| | | | | | N1LSG2_9BACI | | | |
| | | | | | (34.6% identity, | | | |
| | | | | | 53.7% similarity) | | | |
| | | | | | N1LPH2_9BACI | | | |
| | | | | | (32.9% identity, | | | |
| | | | | | 47.5% similarity) | | | |
| | | | | | Cry41Aa1 | | | |
| | | | | | (24.2% identity, | | | |
| | | | | | 38.0% similarity) | | | |
| APG00060 | 90 | 91 | | | WP_017154552.1 | Bin | 60, 65, 70, 75, 80, 85, | 65, 70, 75, 80, 85, 90, |
| | | | | | (57.8% identity, | | 90, 95, 96, 97, 98, 99 | 95, 96, 97, 98, 99 |
| | | | | | 62.5% similarity) | | | |
| | | | | | KEZ80012.1 | | | |
| | | | | | (50.4% identity, | | | |
| | | | | | 57.6% similarity) | | | |
| | | | | | WP_003308586.1 | | | |
| | | | | | (41.3% identity, | | | |
| | | | | | 49.6% similarity) | | | |
| | | | | | Cry49Aa1 | | | |
| | | | | | (15.3% identity, | | | |
| | | | | | 24.5% similarity) | | | |
| APG00061 | 92 | 93 | | 94 | US20130227743A1_198 | Cry | 25, 30, 35, 40, 45, 50, | 40, 45, 50, 55, 60, 65, |
| | | | | | (24.5% identity, | | 55, 60, 65, 70, 75, 80, | 70, 75, 80, 85, 90, 95, |
| | | | | | 39.9% similarity) | | 85, 90, 95, 96, 97, 98, | 96, 97, 98, 99 |
| | | | | | | | 99 | |
| | | | | | T1WCQ4_BACTU | | | |
| | | | | | (21.5% identity, | | | |
| | | | | | 31.9% similarity) | | | |
| | | | | | K0G027_BACTU | | | |
| | | | | | (21.3% identity, | | | |
| | | | | | 31.9% similarity) | | | |
| | | | | | Cry70Bb1 | | | |
| | | | | | (20.6% identity, | | | |
| | | | | | 31.1% similarity) | | | |
| APG00063 | 95 | | | | CAJ86541.1 | Bin | 40, 45, 50, 55, 60, 65, | 55, 60, 65, 70, 75, 80, |
| | | | | | (39.9% identity, | | 70, 75, 80, 85, 90, 95, | 85, 90, 95, 96, 97, 98, |
| | | | | | 53.2% similarity) | | 96, 97, 98, 99 | 99 |
| | | | | | CAJ86542.1 | | | |
| | | | | | (39.4% identity, | | | |
| | | | | | 52.2% similarity) | | | |
| | | | | | US_6555655_B1-14 | | | |
| | | | | | (34.1% identity, | | | |
| | | | | | 45.5% similarity) | | | |
| | | | | | Cry35Ab3 | | | |
| | | | | | (19.3% identity, | | | |
| | | | | | 34.1% similarity) | | | |
| APG00069 | 96 | 97, 98 | | | N1LSG2_9BACI | Cry | 30, 35, 40, 45, 50, 55, | 45, 50, 55, 60, 65, 70, |
| | | | | | (29.1% identity, | | 60, 65, 70, 75, 80, 85, | 75, 80, 85, 90, 95, 96, |
| | | | | | 40.6% similarity) | | 90, 95, 96, 97, 98, 99 | 97, 98, 99 |
| | | | | | N1LPH2_9BACI | | | |
| | | | | | (27.6% identity, | | | |
| | | | | | 36.9% similarity) | | | |
| | | | | | N1LT74_9BACI | | | |
| | | | | | (27.0% identity, | | | |
| | | | | | 38.5% similarity) | | | |
| | | | | | Cry41Ab1 | | | |
| | | | | | (20.3% identity, | | | |
| | | | | | 29.3% similarity) | | | |
| APG00077 | 99 | 100 | | | APG00033 | Vip | 70, 75, 80, 85, 90, 95, | 80, 85, 90, 95, 96, 97, |
| | | | | | (76.5% identity, | | 96, 97, 98, 99 | 98, 99 |
| | | | | | 84.1% similarity) | | | |
| | | | | | APG00104 | | | |
| | | | | | (70.9% identity, | | | |
| | | | | | 79.8% similarity) | | | |
| | | | | | KEZ80024.1 | | | |
| | | | | | (67.4% identity, | | | |
| | | | | | 78.3% similarity) | | | |
| | | | | | US_8334431_B2-14 | | | |
| | | | | | (24.7% identity, | | | |
| | | | | | 42.5% similarity) | | | |
| | | | | | US_6204435-4 | | | |
| | | | | | (24.2% identity, | | | |
| | | | | | 42.2% similarity) | | | |
| | | | | | Vip3Aa49 | | | |
| | | | | | (23.9% identity, | | | |
| | | | | | 41.7% similarity) | | | |
| APG00080 | 101 | 102, 103, | | | US_8759619_B2-17 | Cry | 25, 30, 35, 40, 45, 50, | 35, 40, 45, 50, 55, 60, |
| | | 104 | | | (23.1% identity, | | 55, 60, 65, 70, 75, 80, | 65, 70, 75, 80, 85, 90, |
| | | | | | 32.6% similarity) | | 85, 90, 95, 96, 97, 98, | 95, 96, 97, 98, 99 |
| | | | | | | | 99 | |
| | | | | | US_7923602_B2-6 | | | |
| | | | | | (21.4% identity, | | | |
| | | | | | 31.2% similarity) | | | |
| | | | | | AEH76817.1 | | | |
| | | | | | (20.5% identity, | | | |
| | | | | | 29.9% similarity) | | | |
| | | | | | Cry21Ba1 | | | |
| | | | | | (19.5% identity, | | | |
| | | | | | 30.5% similarity) | | | |
| APG00081 | 105 | 106 | | | APG00066 | Cry | 30, 35, 40, 45, 50, 55, | 50, 55, 60, 65, 70, 75, |
| | | | | | (83.1% identity, | | 60, 65, 70, 75, 80, 85, | 80, 85, 90, 95, 96, 97, |
| | | | | | 90.3% similarity) | | 90, 95, 96, 97, 98, 99 | 98, 99 |
| | | | | | CAC80985.1 | | | |
| | | | | | (29.7% identity, | | | |
| | | | | | 46.3% similarity) | | | |
| | | | | | Cry56Aa2 | | | |
| | | | | | (28.5% identity, | | | |
| | | | | | 44.4% similarity) | | | |
| APG00082 | 107 | 108, 109, | | | J8MY88_BACCE | Cry | 50, 55, 60, 65, 70, 75, | 60, 65, 70, 75, 80, 85, |
| | | 110 | | | (48.5% identity, | | 80, 85, 90, 95, 96, 97, | 90, 95, 96, 97, 98, 99 |
| | | | | | 56.4% similarity) | | 98, 99 | |
| | | | | | US_8759619_B2-25 | | | |
| | | | | | (38.5% identity, | | | |
| | | | | | 48.7% similarity) | | | |
| | | | | | US_8759619_B2-23 | | | |
| | | | | | (37.4% identity, | | | |
| | | | | | 47.5% similarity) | | | |
| | | | | | Cry32Ea1 | | | |
| | | | | | (36.6% identity, | | | |
| | | | | | 46.8% similarity) | | | |
| APG00083 | 111 | 112 | | | BAC06484.1 | Cry | 40, 45, 50, 55, 60, 65, | 55, 60, 65, 70, 75, 80, |
| | | | | | (37.4% identity, | | 70, 75, 80, 85, 90, 95, | 85, 90, 95, 96, 97, 98, |
| | | | | | 53.6% similarity) | | 96, 97, 98, 99 | 99 |
| | | | | | CR5BA_BACTU | | | |
| | | | | | (36.7% identity, | | | |
| | | | | | 51.0% similarity) | | | |
| | | | | | AFJ04417.1 | | | |
| | | | | | (36.6% identity, | | | |
| | | | | | 51.1% similarity) | | | |
| | | | | | WP_023521141.1 | | | |
| | | | | | (36.6% identity, | | | |
| | | | | | 51.1% similarity) | | | |
| APG00086 | 113 | 114, 115 | | | N1LPH2_9BACI | Cry | 70, 75, 80, 85, 90, 95, | 85, 90, 95, 96, 97, 98, |
| | | | | | (67.8% identity, | | 96, 97, 98, 99 | 99 |
| | | | | | 81.5% similarity) | | | |
| | | | | | APG00122 | | | |
| | | | | | (62.8% identity, | | | |
| | | | | | 73.8% similarity) | | | |
| | | | | | N1LSG2_9BACI | | | |
| | | | | | (61.0% identity, | | | |
| | | | | | 72.9% similarity) | | | |
| | | | | | N1LT74_9BACI | | | |
| | | | | | (33.3% identity, | | | |
| | | | | | 52.2% similarity) | | | |
| | | | | | Cry41Ba1 | | | |
| | | | | | (26.8% identity, | | | |
| | | | | | 40.5% similarity) | | | |
| APG00088 | 116 | 117 | | | A9VV88_BACWK | Cry | 70, 75, 80, 85, 90, 95, | 80, 85, 90, 95, 96, 97, |
| | | | | | (67.1% identity, | | 96, 97, 98, 99 | 98, 99 |
| | | | | | 76.8% similarity) | | | |
| | | | | | US20130227743A1_24 | | | |
| | | | | | (64.0% identity, | | | |
| | | | | | 73.4% similarity) | | | |
| | | | | | WP_025988975.1 | | | |
| | | | | | (51.5% identity, | | | |
| | | | | | 57.3% similarity) | | | |
| | | | | | Cry8Ca3 | | | |
| | | | | | (21.6% identity, | | | |
| | | | | | 31.8% similarity) | | | |
| APG00089 | 118 | 119 | | | US_8759619_B2-25 | Cry32 | 55, 60, 65, 70, 75, 80, | 65, 70, 75, 80, 85, 90, |
| | | | | | (51.5% identity, | | 85, 90, 95, 96, 97, 98, | 95, 96, 97, 98, 99 |
| | | | | | 62.4% similarity) | | 99 | |
| | | | | | US_8318900_B2-87 | | | |
| | | | | | (50.3% identity, | | | |
| | | | | | 59.0% similarity) | | | |
| | | | | | Cry32Ab1 | | | |
| | | | | | (49.0% identity, | | | |
| | | | | | 60.1% similarity) | | | |
| APG00091 | 120 | 121 | | | APG00021 | Mtx | 35, 40, 45, 50, 55, 60, | 50, 55, 60, 65, 70, 75, |
| | | | | | (93.6% identity, | | 65, 70, 75, 80, 85, 90, | 80, 85, 90, 95, 96, 97, |
| | | | | | 96.4% similarity) | | 95, 96, 97, 98, 99 | 98, 99 |
| | | | | | BAD22577.1 | | | |
| | | | | | (30.8% identity, | | | |
| | | | | | 46.2% similarity) | | | |
| | | | | | US_8461421_B2-102 | | | |
| | | | | | (30.8% identity, | | | |
| | | | | | 45.8% similarity) | | | |
| | | | | | WP_029440439.1 | | | |
| | | | | | (27.1% identity, | | | |
| | | | | | 40.9% similarity) | | | |
| | | | | | Cry33Aa1 | | | |
| | | | | | (26.0% identity, | | | |
| | | | | | 40.3% similarity) | | | |
| APG00092 | 122 | 123 | | | R8S542_BACCE | Mtx | 50, 55, 60, 65, 70, 75, | 65, 70, 75, 80, 85, 90, |
| | | | | | (46.0% identity, | | 80, 85, 90, 95, 96, 97, | 95, 96, 97, 98, 99 |
| | | | | | 62.8% similarity) | | 98, 99 | |
| | | | | | R8S773_BACCE | | | |
| | | | | | (43.1% identity, | | | |
| | | | | | 60.6% similarity) | | | |
| | | | | | R8R7A7_BACCE | | | |
| | | | | | (40.2% identity, | | | |
| | | | | | 60.3% similarity) | | | |
| | | | | | A0A015NB99_BACTU | | | |
| | | | | | (31.4% identity, | | | |
| | | | | | 48.4% similarity) | | | |
| APG00093 | 124 | | | | US20140096281A1_15 | Cry | 50, 55, 60, 65, 70, 75, | 60, 65, 70, 75, 80, 85, |
| | | | | | (45.6% identity, | | 80, 85, 90, 95, 96, 97, | 90, 95, 96, 97, 98, 99 |
| | | | | | 57.7% similarity) | | 98, 99 | |
| | | | | | US20140096281A1_16 | | | |
| | | | | | (45.5% identity, | | | |
| | | | | | 57.7% similarity) | | | |
| | | | | | US20140096281A1_14 | | | |
| | | | | | (45.4% identity, | | | |
| | | | | | 57.4% similarity) | | | |
| | | | | | Cry42Aa1 | | | |
| | | | | | (24.5% identity, | | | |
| | | | | | 36.7% similarity) | | | |
| APG00096 | 125 | 126, 127 | | | US_8461415_B2-42 | Cry | 90, 95, 96, 97, 98, 99 | 95, 96, 97, 98, 99 |
| | | | | | (89.2% identity, | | | |
| | | | | | 93.3% similarity) | | | |
| | | | | | US_8461415_B2-43 | | | |
| | | | | | (72.7% identity, | | | |
| | | | | | 75.8% similarity) | | | |
| | | | | | APG00030 | | | |
| | | | | | (72.1% identity, | | | |
| | | | | | 84.8% similarity) | | | |
| | | | | | APG00114 | | | |
| | | | | | (66.1% identity, | | | |
| | | | | | 80.8% similarity) | | | |
| | | | | | US_2013_0227743_A1_194 | | | |
| | | | | | (47.4% identity, | | | |
| | | | | | 49.9% similarity) | | | |
| | | | | | Cry42Aa1 | | | |
| | | | | | (22.9% identity, | | | |
| | | | | | 37.1% similarity) | | | |
| APG00098 | 128 | 129 | | | US_8318900_B2-95 | Mtx | 35, 40, 45, 50, 55, 60, | 50, 55, 60, 65, 70, 75, |
| | | | | | (31.9% identity, | | 65, 70, 75, 80, 85, 90, | 80, 85, 90, 95, 96, 97, |
| | | | | | 46.7% similarity) | | 95, 96, 97, 98, 99 | 98, 99 |
| | | | | | US20130227743A1_84 | | | |
| | | | | | (31.0% identity, | | | |
| | | | | | 44.8% similarity) | | | |
| | | | | | ADE27985.1 | | | |
| | | | | | (30.7% identity, | | | |
| | | | | | 44.3% similarity) | | | |
| | | | | | BAJ05397.1 | | | |
| | | | | | (28.0% identity, | | | |
| | | | | | 44.8% similarity) | | | |
| APG00100 | 130 | | | | APG00029 | Cry | 25, 30, 35, 40, 45, 50, | 40, 45, 50, 55, 60, 65, |
| | | | | | (67.8% identity, | | 55, 60, 65, 70, 75, 80, | 70, 75, 80, 85, 90, 95, |
| | | | | | 80.5% similarity) | | 85, 90, 95, 96, 97, 98, | 96, 97, 98, 99 |
| | | | | | | | 99 | |
| | | | | | B8PS57_BACTU | | | |
| | | | | | (23.8% identity, | | | |
| | | | | | 39.9% similarity) | | | |
| | | | | | AFB18319.1 | | | |
| | | | | | (23.7% identity, | | | |
| | | | | | 39.5% similarity) | | | |
| | | | | | WP_000390241.1 | | | |
| | | | | | (23.7% identity, | | | |
| | | | | | 39.4% similarity) | | | |
| | | | | | Cry11Ba1 | | | |
| | | | | | (23.0% identity, | | | |
| | | | | | 37.0% similarity) | | | |
| APG00102 | 131 | | | | EP_2130839-1.01 | Cry | 35, 40, 45, 50, 55, 60, | 55, 60, 65, 70, 75, 80, |
| | | | | | (34.6% identity, | | 65, 70, 75, 80, 85, 90, | 85, 90, 95, 96, 97, 98, |
| | | | | | 50.3% similarity) | | 95, 96, 97, 98, 99 | 99 |
| | | | | | W4EWR0_9BACI | | | |
| | | | | | (34.5% identity, | | | |
| | | | | | 50.2% similarity) | | | |
| | | | | | WP_033728958.1 | | | |
| | | | | | (34.2% identity, | | | |
| | | | | | 49.7% similarity) | | | |
| | | | | | Cry2Af2 | | | |
| | | | | | (31.2% identity, | | | |
| | | | | | 47.8% similarity) | | | |
| APG00103 | 132 | 133 | | | J8JK75_BACCE | Cry | 50, 55, 60, 65, 70, 75, | 60, 65, 70, 75, 80, 85, |
| | | | | | (47.6% identity, | | 80, 85, 90, 95, 96, 97, | 90, 95, 96, 97, 98, 99 |
| | | | | | 59.4% similarity) | | 98, 99 | |
| | | | | | J8N2R5_BACCE | | | |
| | | | | | (47.3% identity, | | | |
| | | | | | 59.5% similarity) | | | |
| | | | | | US20140096281A1_12 | | | |
| | | | | | (28.1% identity, | | | |
| | | | | | 34.1% similarity) | | | |
| | | | | | Cry32Ea1 | | | |
| | | | | | (25.8% identity, | | | |
| | | | | | 34.8% similarity) | | | |
| APG00106 | 134 | | | | EJS10693.1 | Vip | 75, 80, 85, 90, 95, 96, | 85, 90, 95, 96, 97, 98, |
| | | | | | (73.3% identity, | | 97, 98, 99 | 99 |
| | | | | | 82.1% similarity) | | | |
| | | | | | WP_033733438.1 | | | |
| | | | | | (69.6% identity, | | | |
| | | | | | 76.9% similarity) | | | |
| | | | | | AGT29561.1 | | | |
| | | | | | (58.9% identity, | | | |
| | | | | | 69.8% similarity) | | | |
| | | | | | Vip1Da1 | | | |
| | | | | | (26.8% identity, | | | |
| | | | | | 42.1% similarity) | | | |
| APG00109 | 135 | 136, 137, | | | R8DHS1_BACCE | Cry | 95, 96, 97, 98, 99 | 95, 96, 97, 98, 99 |
| | | 138 | | | (92.1% identity, | | | |
| | | | | | 93.1% similarity) | | | |
| | | | | | US20130227743A1_30 | | | |
| | | | | | (76.4% identity, | | | |
| | | | | | 78.5% similarity) | | | |
| | | | | | APG00026 | | | |
| | | | | | (69.2% identity, | | | |
| | | | | | 79.5% similarity) | | | |
| | | | | | K0FZJ7_BACTU | | | |
| | | | | | (63.0% identity, | | | |
| | | | | | 70.6% similarity) | | | |
| | | | | | Cry24Ba1 | | | |
| | | | | | (25.8% identity, | | | |
| | | | | | 38.8% similarity) | | | |
| APG00111 | 139 | 140, 141 | | 142 | ACF15199.1 | Cry | 55, 60, 65, 70, 75, 80, | 65, 70, 75, 80, 85, 90, |
| | | | | | (52.0% identity, | | 85, 90, 95, 96, 97, 98, | 95, 96, 97, 98, 99 |
| | | | | | 61.7% similarity) | | 99 | |
| | | | | | APG00204 | | | |
| | | | | | (50.7% identity, | | | |
| | | | | | 60.1% similarity) | | | |
| | | | | | US_7351881_B2-25 | | | |
| | | | | | (50.1% identity, | | | |
| | | | | | 61.0% similarity) | | | |
| | | | | | US_8044266_B2-3 | | | |
| | | | | | (49.5% identity, | | | |
| | | | | | 59.2% similarity) | | | |
| | | | | | Cry39Aa1 | | | |
| | | | | | (33.0% identity, | | | |
| | | | | | 45.6% similarity) | | | |
| APG00122 | 143 | 144, 145 | | | N1LSG2_9BACI | Cry | 80, 85, 90, 95, 96, 97, | 85, 90, 95, 96, 97, 98, |
| | | | | | (76.2% identity, | | 98, 99 | 99 |
| | | | | | 83.9% similarity) | | | |
| | | | | | APG00086 | | | |
| | | | | | (62.8% identity, | | | |
| | | | | | 73.8% similarity) | | | |
| | | | | | N1LPH2_9BACI | | | |
| | | | | | (59.5% identity, | | | |
| | | | | | 72.8% similarity) | | | |
| | | | | | N1LT74_9BACI | | | |
| | | | | | (33.6% identity, | | | |
| | | | | | 51.0% similarity) | | | |
| | | | | | Cry41Ba1 | | | |
| | | | | | (26.4% identity, | | | |
| | | | | | 41.8% similarity) | | | |
| APG00123 | 146 | 147, 148, | | 150 | J8HQM8_BACCE | Cry | 25, 30, 35, 40, 45, 50, | 40, 45, 50, 55, 60, 65, |
| | | 149 | | | (24.8% identity, | | 55, 60, 65, 70, 75, 80, | 70, 75, 80, 85, 90, 95, |
| | | | | | 37.9% similarity) | | 85, 90, 95, 96, 97, 98, | 96, 97, 98, 99 |
| | | | | | | | 99 | |
| | | | | | WP_033694850.1 | | | |
| | | | | | (23.6% identity, | | | |
| | | | | | 39.3% similarity) | | | |
| | | | | | WP_000774801.1 | | | |
| | | | | | (22.9% identity, | | | |
| | | | | | 36.6% similarity) | | | |
| | | | | | Cry41Ab1 | | | |
| | | | | | (22.6% identity, | | | |
| | | | | | 36.1% similarity) | | | |
| APG00125 | 151 | 152 | | | US_7105332_B2-12 | Cry | 35, 40, 45, 50, 55, 60, | 50, 55, 60, 65, 70, 75, |
| | | | | | (31.4% identity, | | 65, 70, 75, 80, 85, 90, | 80, 85, 90, 95, 96, 97, |
| | | | | | 47.0% similarity) | | 95, 96, 97, 98, 99 | 98, 99 |
| | | | | | ACQ91256.1 | | | |
| | | | | | (20.3% identity, | | | |
| | | | | | 29.4% similarity) | | | |
| | | | | | W0LR53_BACTU | | | |
| | | | | | (20.0% identity, | | | |
| | | | | | 28.8% similarity) | | | |
| | | | | | Cry4Cb1 | | | |
| | | | | | (19.6% identity, | | | |
| | | | | | 28.8% similarity) | | | |
| APG00126 | 153 | 154 | | | WP_016110460.1 | Cyt | 95, 96, 97, 98, 99 | 96, 97, 98, 99 |
| | | | | | (92.6% identity, | | | |
| | | | | | 95.1% similarity) | | | |
| | | | | | APG00128 | | | |
| | | | | | (55.2% identity, | | | |
| | | | | | 70.8% similarity) | | | |
| | | | | | WP_016110459.1 | | | |
| | | | | | (54.4% identity, | | | |
| | | | | | 70.0% similarity) | | | |
| | | | | | US_6686452-2 | | | |
| | | | | | (39.1% identity, | | | |
| | | | | | 54.7% similarity) | | | |
| | | | | | Cyt2Ba15 | | | |
| | | | | | (36.2% identity, | | | |
| | | | | | 53.6% similarity) | | | |
| APG00127 | 155 | 156 | | | APG00031 | Cry | 55, 60, 65, 70, 75, 80, | 70, 75, 80, 85, 90, 95, |
| | | | | | (99.5% identity, | | 85, 90, 95, 96, 97, 98, | 96, 97, 98, 99 |
| | | | | | 99.7% similarity) | | 99 | |
| | | | | | B7NZX8_BACTU | | | |
| | | | | | (54.7% identity, | | | |
| | | | | | 68.6% similarity) | | | |
| | | | | | B8K1J3_BACTU | | | |
| | | | | | (35.5% identity, | | | |
| | | | | | 44.7% similarity) | | | |
| | | | | | AAQ73470.1 | | | |
| | | | | | (35.3% identity, | | | |
| | | | | | 44.4% similarity) | | | |
| | | | | | Cry8Ja1 | | | |
| | | | | | (34.7% identity, | | | |
| | | | | | 43.4% similarity) | | | |
| APG00128 | 157 | | | | WP_016110459.1 | Cyt | 95, 96, 97, 98, 99 | 98, 99 |
| | | | | | (94.1% identity, | | | |
| | | | | | 97.5% similarity) | | | |
| | | | | | APG00126 | | | |
| | | | | | (55.2% identity, | | | |
| | | | | | 70.8% similarity) | | | |
| | | | | | WP_016110460.1 | | | |
| | | | | | (53.0% identity, | | | |
| | | | | | 69.3% similarity) | | | |
| | | | | | US_7786351_B2-349 | | | |
| | | | | | (42.4% identity, | | | |
| | | | | | 57.6% similarity) | | | |
| | | | | | Cyt2Ba15 | | | |
| | | | | | (39.8% identity, | | | |
| | | | | | 56.8% similarity) | | | |
| APG00129 | 158 | 159 | | | W8YCZ9_BACTU | Mtx | 96, 97, 98, 99 | 99 |
| | | | | | (95.8% identity, | | | |
| | | | | | 98.3% similarity) | | | |
| | | | | | US20130227743A1_106 | | | |
| | | | | | (22.9% identity, | | | |
| | | | | | 40.0% similarity) | | | |
| APG00133 | 160 | 161 | | | W0LR53_BACTU | Cry | 25, 30, 35, 40, 45, 50, | 35, 40, 45, 50, 55, 60, |
| | | | | | (21.4% identity, | | 55, 60, 65, 70, 75, 80, | 65, 70, 75, 80, 85, 90, |
| | | | | | 30.8% similarity) | | 85, 90, 95, 96, 97, 98, | 95, 96, 97, 98, 99 |
| | | | | | | | 99 | |
| | | | | | ACQ91256.1 | | | |
| | | | | | (21.3% identity, | | | |
| | | | | | 30.7% similarity) | | | |
| | | | | | ACU57500.1 | | | |
| | | | | | (21.2% identity, | | | |
| | | | | | 30.1% similarity) | | | |
| | | | | | Cry4Cb1 | | | |
| | | | | | (21.0% identity, | | | |
| | | | | | 30.4% similarity) | | | |
| APG00142 | 162 | | | | US20100298211A1_9 | Cry | 25, 30, 35, 40, 45, 50, | 45, 50, 55, 60, 65, 70, |
| | | | | | (22.8% identity, | | 55, 60, 65, 70, 75, 80, | 75, 80, 85, 90, 95, 96, |
| | | | | | 42.6% similarity) | | 85, 90, 95, 96, 97, 98, | 97, 98, 99 |
| | | | | | | | 99 | |
| | | | | | AFB18319.1 | | | |
| | | | | | (21.4% identity, | | | |
| | | | | | 37.7% similarity) | | | |
| | | | | | US20130227743A1_38 | | | |
| | | | | | (21.3% identity, | | | |
| | | | | | 37.6% similarity) | | | |
| | | | | | Cry18Aa1 | | | |
| | | | | | (20.7% identity, | | | |
| | | | | | 31.6% similarity) | | | |
| APG00145 | 163 | 164 | | 165 | APG00041 | Cry | 70, 75, 80, 85, 90, 95, | 80, 85, 90, 95, 96, 97, |
| | | | | | (77.4% identity, | | 96, 97, 98, 99 | 98, 99 |
| | | | | | 83.5% similarity) | | | |
| | | | | | AEH76822.1 | | | |
| | | | | | (65.9% identity, | | | |
| | | | | | 75.9% similarity) | | | |
| | | | | | J8N7T9_BACCE | | | |
| | | | | | (64.9% identity, | | | |
| | | | | | 75.0% similarity) | | | |
| | | | | | APG00130 | | | |
| | | | | | (57.1% identity, | | | |
| | | | | | 63.1% similarity) | | | |
| | | | | | X2J6C3_BACTU | | | |
| | | | | | (54.4% identity, | | | |
| | | | | | 67.8% similarity) | | | |
| | | | | | APG00140 | | | |
| | | | | | (54.1% identity, | | | |
| | | | | | 66.5% similarity) | | | |
| | | | | | Cry42Aa1 | | | |
| | | | | | (37.7% identity, | | | |
| | | | | | 53.2% similarity) | | | |
| APG00146 | 166 | 167 | | | C3GC23_BACTU | Mtx | 95, 96, 97, 98, 99 | 96, 97, 98, 99 |
| | | | | | (94.4% identity, | | | |
| | | | | | 95.9% similarity) | | | |
| | | | | | US20130227743A1_102 | | | |
| | | | | | (62.7% identity, | | | |
| | | | | | 77.3% similarity) | | | |
| | | | | | WP_036654376.1 | | | |
| | | | | | (44.4% identity, | | | |
| | | | | | 58.8% similarity) | | | |
| | | | | | W2E623_9BACL | | | |
| | | | | | (43.3% identity, | | | |
| | | | | | 57.3% similarity) | | | |
| APG00147 | 168 | 169 | | | J8HH32_BACCE | Bin | 35, 40, 45, 50, 55, 60, | 50, 55, 60, 65, 70, 75, |
| | | | | | (33.6% identity, | | 65, 70, 75, 80, 85, 90, | 80, 85, 90, 95, 96, 97 |
| | | | | | 49.2% similarity) | | 95, 96, 97, 98, 99 | , 98, 99 |
| | | | | | WP_002090518.1 | | | |
| | | | | | (29.3% identity, | | | |
| | | | | | 45.4% similarity) | | | |
| | | | | | R8CM29_BACCE | | | |
| | | | | | (29.3% identity, | | | |
| | | | | | 44.9% similarity) | | | |
| | | | | | Cry49Ab1 | | | |
| | | | | | (17.8% identity, | | | |
| | | | | | 29.7% similarity) | | | |
| APG00148 | 170 | 171 | | | US20130227743A1_112 | Mtx | 45, 50, 55, 60, 65, 70, | 65, 70, 75, 80, 85, 90, |
| | | | | | (44.0% identity, | | 75, 80, 85, 90, 95, 96, | 95, 96, 97, 98, 99 |
| | | | | | 61.3% similarity) | | 97, 98, 99 | |
| | | | | | US20130227743A1_114 | | | |
| | | | | | (40.1% identity, | | | |
| | | | | | 58.3% similarity) | | | |
| | | | | | WP_000239374.1 | | | |
| | | | | | (26.9% identity, | | | |
| | | | | | 43.2% similarity) | | | |
| | | | | | AIK29697.1 | | | |
| | | | | | (25.1% identity, | | | |
| | | | | | 40.2% similarity) | | | |
| APG00149 | 172 | 173 | | | R8S3D4_BACCE | Cry | 30, 35, 40, 45, 50, 55, | 50, 55, 60, 65, 70, 75, |
| | | | | | (29.4% identity, | | 60, 65, 70, 75, 80, 85, | 80, 85, 90, 95, 96, 97, |
| | | | | | 42.7% similarity) | | 90, 95, 96, 97, 98, 99 | 98, 99 |
| | | | | | US20130227743A1_34 | | | |
| | | | | | (29.2% identity, | | | |
| | | | | | 46.5% similarity) | | | |
| | | | | | US_7521235_B2-2 | | | |
| | | | | | (28.8% identity, | | | |
| | | | | | 42.2% similarity) | | | |
| | | | | | Cry8Ga2 | | | |
| | | | | | (18.8% identity, | | | |
| | | | | | 27.8% similarity) | | | |
| APG00151 | 174 | 175 | | | US20130227743A1_40 | Bin | 65, 70, 75, 80, 85, 90, | 70, 75, 80, 85, 90, 95, |
| | | | | | (60.8% identity, | | 95, 96, 97, 98, 99 | 96, 97, 98, 99 |
| | | | | | 69.2% similarity) | | | |
| | | | | | US20130227743A1_48 | | | |
| | | | | | (36.8% identity, | | | |
| | | | | | 45.8% similarity) | | | |
| | | | | | AEH76820.1 | | | |
| | | | | | (34.4% identity, | | | |
| | | | | | 43.8% similarity) | | | |
| | | | | | Cry4Ba4 | | | |
| | | | | | (26.4% identity, | | | |
| | | | | | 37.3% similarity) | | | |
| APG00161 | 176 | 177, 178, | | | APG00085 | Cry | 40, 45, 50, 55, 60, 65, | 55, 60, 65, 70, 75, 80, |
| | | 179 | | | (78.4% identity, | | 70, 75, 80, 85, 90, 95, | 85, 90, 95, 96, 97, 98, |
| | | | | | 86.5% similarity) | | 96, 97, 98, 99 | 99 |
| | | | | | US_8461415_B2-47 | | | |
| | | | | | (37.2% identity, | | | |
| | | | | | 50.1% similarity) | | | |
| | | | | | US_8461415_B2-62 | | | |
| | | | | | (37.1% identity, | | | |
| | | | | | 49.6% similarity) | | | |
| | | | | | US_8461415_B2-49 | | | |
| | | | | | (35.9% identity, | | | |
| | | | | | 49.9% similarity) | | | |
| | | | | | Cry8Ia1 | | | |
| | | | | | (23.5% identity, | | | |
| | | | | | 35.2% similarity) | | | |
| APG00167 | 180 | | | | CAJ86541.1 | Bin | 25, 30, 35, 40, 45, 50, | 40, 45, 50, 55, 60, 65, |
| | | | | | (24.9% identity, | | 55, 60, 65, 70, 75, 80, | 70, 75, 80, 85, 90, 95, |
| | | | | | 36.7% similarity) | | 85, 90, 95, 96, 97, 98, | 96, 97, 98, 99 |
| | | | | | | | 99 | |
| | | | | | CAJ86542.1 | | | |
| | | | | | (24.7% identity, | | | |
| | | | | | 35.9% similarity) | | | |
| | | | | | Cry36Aa1 | | | |
| | | | | | (22.6% identity, | | | |
| | | | | | 36.0% similarity) | | | |
| APG00169 | 181 | 182 | | | Cry54Aa2 | Cry | 35, 40, 45, 50, 55, 60, | 45, 50, 55, 60, 65, 70, |
| | | | | | (32.8% identity, | | 65, 70, 75, 80, 85, 90, | 75, 80, 85, 90, 95, 96, |
| | | | | | 44.2% similarity) | | 95, 96, 97, 98, 99 | 97, 98, 99 |
| APG00174 | 183 | 184, 185 | | | US_8796026_B2-6 | Mtx | 75, 80, 85, 90, 95, 96, | 85, 90, 95, 96, 97, 98, |
| | | | | | (74.8% identity, | | 97, 98, 99 | 99 |
| | | | | | 83.7% similarity) | | | |
| | | | | | WP_000875423.1 | | | |
| | | | | | (74.5% identity, | | | |
| | | | | | 84.3% similarity) | | | |
| | | | | | WP_003275939.1 | | | |
| | | | | | (73.6% identity, | | | |
| | | | | | 83.1% similarity) | | | |
| | | | | | US_8796026_B2-4 | | | |
| | | | | | (72.1% identity, | | | |
| | | | | | 81.7% similarity) | | | |
| | | | | | APG00055 | | | |
| | | | | | (70.3% identity, | | | |
| | | | | | 80.5% similarity) | | | |
| APG00179 | 186 | 187 | | | US_8759619_B2-24 | Cry | 35, 40, 45, 50, 55, 60, | 50, 55, 60, 65, 70, 75, |
| | | | | | (30.6% identity, | | 65, 70, 75, 80, 85, 90, | 80, 85, 90, 95, 96, |
| | | | | | 46.0% similarity) | | 95, 96, 97, 98, 99 | 97, 98, 99 |
| | | | | | J8N7T9_BACCE | | | |
| | | | | | (28.0% identity, | | | |
| | | | | | 41.6% similarity) | | | |
| | | | | | X2J6C3_BACTU | | | |
| | | | | | (27.7% identity, | | | |
| | | | | | 42.0% similarity) | | | |
| | | | | | Cry73Aa | | | |
| | | | | | (27.0% identity, | | | |
| | | | | | 40.0% similarity) | | | |
| APG00185 | 188 | 189 | 190 | | APG00068 | Cry32 | 80, 85, 90, 95, 96, 97, | 85, 90, 95, 96, 97, 98, |
| | | | | | (51.3% identity, | | 98, 99 | 99 |
| | | | | | 61.1% similarity) | | | |
| | | | | | Cry32Ea1 | | | |
| | | | | | (50.5% identity, | | | |
| | | | | | 61.3% similarity) | | | |
| | | | | | APG00054 | | | |
| | | | | | (50.1% identity, | | | |
| | | | | | 61.2% similarity) | | | |
| | | | | | US_8759619_B2-9_1 | | | |
| | | | | | (75.3% identity, | | | |
| | | | | | 81.6% similarity) | | | |
| | | | | | US_8461421_B2-26_1 | | | |
| | | | | | (61.6% identity, | | | |
| | | | | | 72.6% similarity) | | | |
| | | | | | US_8318900_B2-32_1 | | | |
| | | | | | (58.3% identity, | | | |
| | | | | | 66.9% similarity) | | | |
| APG00191 | 191 | | | | KEZ80012.1 | Bin | 70, 75, 80, 85, 90, 95, | 80, 85, 90, 95, 96, 97, |
| | | | | | (65.9% identity, | | 96, 97, 98, 99 | 98, 99 |
| | | | | | 78.8% similarity) | | | |
| | | | | | WP_017154552.1 | | | |
| | | | | | (61.5% identity, | | | |
| | | | | | 75.4% similarity) | | | |
| | | | | | APG00090 | | | |
| | | | | | (61.1% identity, | | | |
| | | | | | 73.6% similarity) | | | |
| | | | | | WP_003308586.1 | | | |
| | | | | | (47.8% identity, | | | |
| | | | | | 62.7% similarity) | | | |
| | | | | | Cry49Ab1 | | | |
| | | | | | (21.9% identity, | | | |
| | | | | | 33.8% similarity) | | | |
| APG00199 | 192 | | | | US20100298211A1_9 | Cry | 45, 50, 55, 60, 65, 70, | 60, 65, 70, 75, 80, 85, |
| | | | | | (43.3% identity, | | 75, 80, 85, 90, 95, 96, | 90, 95, 96, 97, 98, 99 |
| | | | | | 59.7% similarity) | | 97, 98, 99 | |
| | | | | | US20130227743A1_16 | | | |
| | | | | | (42.4% identity, | | | |
| | | | | | 59.9% similarity) | | | |
| | | | | | C3I9T3_BACTU | | | |
| | | | | | (40.9% identity, | | | |
| | | | | | 57.6% similarity) | | | |
| | | | | | Cry11Aa1 | | | |
| | | | | | (25.4% identity, | | | |
| | | | | | 40.2% similarity) | | | |
| APG00201 | 193 | 194 | | | APG00006 | Mtx | 80, 85, 90, 95, 96, 97, | 85, 90, 95, 96, 97, 98, |
| | | | | | (79.7% identity, | | 98, 99 | 99 |
| | | | | | 88.2% similarity) | | | |
| | | | | | APG00036 | | | |
| | | | | | (79.3% identity, | | | |
| | | | | | 85.9% similarity) | | | |
| | | | | | APG00022 | | | |
| | | | | | (78.8% identity, | | | |
| | | | | | 85.9% similarity) | | | |
| | | | | | J8YPM2_BACCE | | | |
| | | | | | (75.7% identity, | | | |
| | | | | | 84.6% similarity) | | | |
| | | | | | US20130227743A1_100 | | | |
| | | | | | (75.3% identity, | | | |
| | | | | | 84.5% similarity) | | | |
| | | | | | US20130227743A1_60 | | | |
| | | | | | (46.6% identity, | | | |
| | | | | | 51.1% similarity) | | | |
| | | | | | A8LVM9_SALAI | | | |
| | | | | | (24.6% identity, | | | |
| | | | | | 38.4% similarity) | | | |
| APG00202 | 195 | 196 | | | APG00208 | Mtx | 90, 95, 96, 97, 98, 99 | 95, 96, 97, 98, 99 |
| | | | | | (88.6% identity, | | | |
| | | | | | 93.2% similarity) | | | |
| | | | | | US20130227743A1_120 | | | |
| | | | | | (88.1% identity, | | | |
| | | | | | 91.9% similarity) | | | |
| | | | | | J8F337_BACCE | | | |
| | | | | | (71.6% identity, | | | |
| | | | | | 81.0% similarity) | | | |
| | | | | | US20130227743A1_122 | | | |
| | | | | | (32.9% identity, | | | |
| | | | | | 48.8% similarity) | | | |
| | | | | | R8TCG2_BACCE | | | |
| | | | | | (23.2% identity, | | | |
| | | | | | 36.7% similarity) | | | |
| APG00205 | 197 | 198 | | | APG00018 | Mtx | 75, 80, 85, 90, 95, 96, | 85, 90, 95, 96, 97, 98, |
| | | | | | (97.8% identity, | | 97, 98, 99 | 99 |
| | | | | | 99.0% similarity) | | | |
| | | | | | C3IAI7_BACTU | | | |
| | | | | | (70.7% identity, | | | |
| | | | | | 80.9% similarity) | | | |
| | | | | | J8HRD0_BACCE | | | |
| | | | | | (64.6% identity, | | | |
| | | | | | 74.2% similarity) | | | |
| | | | | | WP_018669999.1 | | | |
| | | | | | (48.1% identity, | | | |
| | | | | | 63.0% similarity) | | | |
| | | | | | H0UDJ3_BRELA | | | |
| | | | | | (47.6% identity, | | | |
| | | | | | 62.0% similarity) | | | |
| APG00206 | 199 | 200 | | | US20130227743A1_198 | Cry | 30, 35, 40, 45, 50, 55, | 45, 50, 55, 60, 65, 70, |
| | | | | | (25.0% identity, | | 60, 65, 70, 75, 80, 85, | 75, 80, 85, 90, 95, 96, |
| | | | | | 42.3% similarity) | | 90, 95, 96, 97, 98, 99 | 97, 98, 99 |
| | | | | | US_8461415_B2-42 | | | |
| | | | | | (20.2% identity, | | | |
| | | | | | 36.1% similarity) | | | |
| | | | | | US_8461415_B2-43 | | | |
| | | | | | (19.6% identity, | | | |
| | | | | | 31.7% similarity) | | | |
| | | | | | Cry41Ab1 | | | |
| | | | | | (17.9% identity, | | | |
| | | | | | 31.0% similarity) | | | |
| APG00208 | 201 | 202 | | | APG00202 | Mtx | 85, 90, 95, 96, 97, 98, | 90, 95, 96, 97, 98, 99 |
| | | | | | (88.6% identity, | | 99 | |
| | | | | | 93.2% similarity) | | | |
| | | | | | US20130227743A1_120 | | | |
| | | | | | (84.1% identity, | | | |
| | | | | | 89.4% similarity) | | | |
| | | | | | J8F337_BACCE | | | |
| | | | | | (71.6% identity, | | | |
| | | | | | 80.8% similarity) | | | |
| | | | | | US20130227743A1_122 | | | |
| | | | | | (32.0% identity, | | | |
| | | | | | 49.5% similarity) | | | |
| | | | | | R8TCG2_BACCE | | | |
| | | | | | (24.2% identity, | | | |
| | | | | | 37.9% similarity) | | | |
| APG00222 | 203 | 204, 205, | | | US20130227743A1_48 | Cry | 55, 60, 65, 70, 75, 80, | 70, 75, 80, 85, 90, 95, |
| | | 206 | | | (53.5% identity, | | 85, 90, 95, 96, 97, 98, | 96, 97, 98, 99 |
| | | | | | 67.1% similarity) | | 99 | |
| | | | | | AEH76820.1 | | | |
| | | | | | (49.3% identity, | | | |
| | | | | | 62.3% similarity) | | | |
| | | | | | US20100298211A1_8 | | | |
| | | | | | (46.0% identity, | | | |
| | | | | | 58.1% similarity) | | | |
| | | | | | Cry32Ea1 | | | |
| | | | | | (43.8% identity, | | | |
| | | | | | 56.9% similarity) | | | |
| APG00234 | 207 | 208, 209 | | | WP_001036192.1 | Mtx | 60, 65, 70, 75, 80, 85, | 75, 80, 85, 90, 95, 96, |
| | | | | | (59.5% identity, | | 90, 95, 96, 97, 98, 99 | 97, 98, 99 |
| | | | | | 74.8% similarity) | | | |
| | | | | | WP_000163136.1 | | | |
| | | | | | (59.2% identity, | | | |
| | | | | | 74.5% similarity) | | | |
| | | | | | WP_000790613.1 | | | |
| | | | | | (58.7% identity, | | | |
| | | | | | 71.9% similarity) | | | |
| | | | | | APG00013 | | | |
| | | | | | (57.7% identity, | | | |
| | | | | | 73.3% similarity) | | | |
| | | | | | WP_003290257.1 | | | |
| | | | | | (49.0% identity, | | | |
| | | | | | 64.8% similarity) | | | |
| APG00272 | 210 | 211 | | | APG00019 | Mtx | 45, 50, 55, 60, 65, 70, | 60, 65, 70, 75, 80, 85, |
| | | | | | (80.2% identity, | | 75, 80, 85, 90, 95, 96, | 90, 95, 96, 97, 98, 99 |
| | | | | | 81.8% similarity) | | 97, 98, 99 | |
| | | | | | WP_034679607.1 | | | |
| | | | | | (43.8% identity, | | | |
| | | | | | 59.1% similarity) | | | |
| | | | | | US_8829279_B2-61 | | | |
| | | | | | (34.4% identity, | | | |
| | | | | | 53.4% similarity) | | | |
| | | | | | US_8829279_B2-2 | | | |
| | | | | | (34.2% identity, | | | |
| | | | | | 53.4% similarity) | | | |
| | | | | | C3HSG6_BACTU | | | |
| | | | | | (33.5% identity, | | | |
| | | | | | 54.0% similarity) | | | |
| APG00299 | 212 | 213 | | | US20130227743A1_108 | Mtx | 95, 96, 97, 98, 99 | 98, 99 |
| | | | | | (93.6% identity, | | | |
| | | | | | 97.3% similarity) | | | |
| | | | | | R8CLR6_BACCE | | | |
| | | | | | (93.0% identity, | | | |
| | | | | | 96.6% similarity) | | | |
| | | | | | J9BNC9_BACCE | | | |
| | | | | | (92.6% identity, | | | |
| | | | | | 97.0% similarity) | | | |
| | | | | | J8E9X3_BACCE | | | |
| | | | | | (92.3% identity, | | | |
| | | | | | 96.6% similarity) | | | |
| | | | | | APG00010 | | | |
| | | | | | (57.9% identity, | | | |
| | | | | | 74.5% similarity) | | | |
| APG00526 | 214 | 215, 216, | | | APG00025 | Cry70 | 95, 96, 97, 98, 99 | 97, 98, 99 |
| | | 217 | | | (93.9% identity, | | | |
| | | | | | 96.5% similarity) | | | |
| | | | | | WP_000162158.1 | | | |
| | | | | | (93.9% identity, | | | |
| | | | | | 96.4% similarity) | | | |
| | | | | | Cry70Ba1 | | | |
| | | | | | (93.6% identity, | | | |
| | | | | | 96.2% similarity) | | | |
| | | | | | APG00728 | | | |
| | | | | | (92.5% identity, | | | |
| | | | | | 95.2% similarity) | | | |
| | | | | | AGU12794.1 | | | |
| | | | | | (89.7% identity, | | | |
| | | | | | 94.3% similarity) | | | |
| APG00717 | 218 | | | | APG00029 | Cry | 30, 35, 40, 45, 50, 55, | 45, 50, 55, 60, 65, 70, |
| | | | | | (96.8% identity, | | 60, 65, 70, 75, 80, 85, | 75, 80, 85, 90, 95, 96, |
| | | | | | 98.6% similarity) | | 90, 95, 96, 97, 98, 99 | 97, 98, 99 |
| | | | | | APG00100 | | | |
| | | | | | (69.4% identity, | | | |
| | | | | | 80.1% similarity) | | | |
| | | | | | Cry11Aa4 | | | |
| | | | | | (25.6% identity, | | | |
| | | | | | 43.1% similarity) | | | |
| APG00728 | 219 | 220, 221, | | | APG00025 | Cry70 | 95, 96, 97, 98, 99 | 97, 98, 99 |
| | | 222 | | | (93.8% identity, | | | |
| | | | | | 97.0% similarity) | | | |
| | | | | | WP_000162158.1 | | | |
| | | | | | (92.8% identity, | | | |
| | | | | | 96.3% similarity) | | | |
| | | | | | Cry70Ba1 | | | |
| | | | | | (92.5% identity, | | | |
| | | | | | 96% similarity) | | | |
| | | | | | APG00526 | | | |
| | | | | | (92.5% identity, | | | |
| | | | | | 95.2% similarity) | | | |
| | | | | | AGU12794.1 | | | |
| | | | | | (86.7% identity, | | | |
| | | | | | 92.6% similarity) | | | |
| APG00847 | 223 | 224, 225 | | | APG00201 | Mtx | 80, 85, 90, 95, 96, 97, | 85, 90, 95, 96, 97, 98, |
| | | | | | (97.0% identity, | | 98, 99 | 99 |
| | | | | | 98.7% similarity) | | | |
| | | | | | APG00006 | | | |
| | | | | | (79.0% identity, | | | |
| | | | | | 88.2% similarity) | | | |
| | | | | | APG00022 | | | |
| | | | | | (77.7% identity, | | | |
| | | | | | 85.1% similarity) | | | |
| | | | | | WP_000963933.1 | | | |
| | | | | | (75.1% identity, | | | |
| | | | | | 84.9% similarity) | | | |
| | | | | | US_2013_0227743_A1-100 | | | |
| | | | | | (75.0% identity, | | | |
| | | | | | 84.9% similarity) | | | |
| APG00982 | 226 | 227 | | | APG00092 | Mtx | 50, 55, 60, 65, 70, 75, | 65, 70, 75, 80, 85, 90, |
| | | | | | (98.2% identity, | | 80, 85, 90, 95, 96, 97, | 95, 96, 97, 98, 99 |
| | | | | | 99.1% similarity) | | 98, 99 | |
| | | | | | WP_016098287.1 | | | |
| | | | | | (45.0% identity, | | | |
| | | | | | 62.6% similarity) | | | |
| | | | | | WP_016098181.1 | | | |
| | | | | | (42.8% identity, | | | |
| | | | | | 61.1% similarity) | | | |
| | | | | | WP_016099611.1 | | | |
| | | | | | (39.9% identity, | | | |
| | | | | | 60.1% similarity) | | | |
| | | | | | WP_033699741.1 | | | |
| | | | | | (32.4% identity, | | | |
| | | | | | 50.0% similarity) | | | |

[0013] i. Classes of Pesticidal Proteins

[0014] The pesticidal proteins provided herein and the nucleotide sequences encoding them are useful in methods for impacting pests. That is, the compositions and methods of the invention find use in agriculture for controlling or killing pests, including pests of many crop plants. The pesticidal proteins provided herein are toxin proteins from bacteria and exhibit activity against certain pests. The pesticidal proteins are from several classes of toxins including Cry, Cyt, BIN, and Mtx toxins. See, for example, Table 1 for the specific protein classifications of the various SEQ ID NOS provided herein. In addition, reference is made throughout this disclosure to Pfam database entries. The Pfam database is a database of protein families, each represented by multiple sequence alignments and a profile hidden Markov model. Finn et al. (2014) Nucl. Acid Res. Database Issue 42:D222-D230.

[0015] Bacillus thuringiensis (Bt) is a gram-positive bacterium that produces insecticidal proteins as crystal inclusions during its sporulation phase of growth. The proteinaceous inclusions of Bacillus thuringiensis (Bt) are called crystal proteins or δ-endotoxins (or Cry proteins), which are toxic to members of the class Insecta and other invertebrates. Similarly, Cyt proteins are parasporal inclusion proteins from Bt that exhibits hemolytic (cytolitic) activity or has obvious sequence similarity to a known Cyt protein. These toxins are highly specific to their target organism, and are innocuous to humans, vertebrates, and plants.

[0016] The structure of the Cry toxins reveals five conserved amino acid blocks, concentrated mainly in the center of the domain or at the junction between the domains. The Cry toxin consists of three domains, each with a specific function. Domain I is a seven α-helix bundle in which a central helix is completely surrounded by six outer helices. This domain is implicated in channel formation in the membrane. Domain II appears as a triangular column of three anti-parallel β-sheets, which are similar to antigen-binding regions of immunoglobulins. Domain III contains anti-parallel β-strands in a β sandwich form. The N-terminal part of the toxin protein is responsible for its toxicity and specificity and contains five conserved regions. The C-terminal part is usually highly conserved and probably responsible for crystal formation. See, for example, U.S. Pat. No. 8,878,007.

[0017] Strains of B. thuringiensis show a wide range of specificity against different insect orders (Lepidoptera, Diptera, Coleoptera, Hymenoptera, Homoptera, Phthiraptera or Mallophaga, and Acari) and other invertebrates (Nemathelminthes, Platyhelminthes, and Sarocomastebrates). The cry proteins have been classified into groups based on toxicity to various insect and invertebrate groups. Generally, Cry I demonstrates toxicity to lepidopterans, Cry II to lepidopterans and dipterans, CryIII to coleopterans, Cry IV to dipterans, and Cry V and Cry VI to nematodes. New Cry proteins can be identified and assigned to a Cry group based on amino acid identity. See, for example, Bravo, A. (1997) J. of Bacteriol. 179:2793-2801; Bravo et al. (2013) Microb. Biotechnol. 6:17-26, herein incorporated by reference.

[0018] Over 750 different cry gene sequences have been classified into 73 groups (Cry1-Cry73), with new members of this gene family continuing to be discovered (Crickmore et al. (2014) www.btnomenclature.info/). The cry gene family consists of several phylogentically non-related protein families that may have different modes of action: the family of three-domain Cry toxins, the family of mosquitocidal Cry toxins, the family of the binary-like toxins, and the Cyt family of toxins (Bravo et al., 2005). Some Bt strains produce additional insecticidal toxins, the VIP toxins. See, also, Cohen et al. (2011) J. Mol. Biol. 413:4-814; Crickmore et al. (2014) Bacillus thuringiensis toxin nomenclature, found on the world wide web at lifesci.sussex.ac.uk/home/Neil_Crickmore/Bt/; Crickmore et al. (1988) Microbiol. Mol. Biol. Rev. 62: 807-813; Gill et al. (1992) Ann. Rev. Entomol. 37: 807-636; Goldbert et al. (1997) Appl. Environ. Microbiol. 63:2716-2712; Knowles et al. (1992) Proc. R. Soc. Ser. B. 248: 1-7; Koni et al. (1994) Microbiology 140: 1869-1880; Lailak et al. (2013) Biochem. Biophys. Res. Commun. 435: 216-221; Lopez-Diaz et al. (2013) Environ. Microbiol. 15: 3030-3039; Perez et al. (2007) Cell. Microbiol. 9: 2931-2937; Promdonkoy et al. (2003) Biochem. J. 374: 255-259; Rigden (2009) FEBS Lett. 583: 1555-1560; Schnepf et al. (1998)Microbiol. Mol. Biol. Rev. 62: 775-806; Soberon et al. (2013) Peptides 41: 87-93; Thiery et al. (1998) J. Am. Mosq. Control Assoc. 14: 472-476; Thomas et al. (1983) FEBS Lett. 154: 362-368; Wirth et al. (1997) Proc. Natl. Acad. Sci. U.S.A. 94: 10536-10540; Wirth et al (2005) Appl. Environ. Microbiol. 71: 185-189; and, Zhang et al. (2006) Biosci. Biotechnol. Biochem. 70: 2199-2204; each of which is herein incorporated by reference in their entirety.

[0019] Cyt designates a parasporal crystal inclusion protein from Bacillus thuringiensis with cytolytic activity, or a protein with sequence similarity to a known Cyt protein. (Crickmore et al. (1998) Microbial. Mol. Biol. Rev. 62: 807-813). The gene is denoted by cyt. These proteins are different in structure and activity from Cry proteins (Gill et al. (1992) Annu. Rev. Entomol. 37: 615-636). The Cyt toxins were first discovered in B. thuringiensis subspecies israelensis (Goldberg et al. (1977) Mosq. News. 37: 355-358). There are 3 Cyt toxin families including 11 holotype toxins in the current nomenclature (Crickmore et al. (2014) Bacillus thuringiensis toxin nomenclature found on the world wide web atlifesci.sussex.ac.uk/home/Neil_Crickmore/Bt/). The majority of the B. thuringiensis isolates with cyt genes show activity against dipteran insects (particularly mosquitoes and black flies), but there are also cyt genes that have been described in B. thuringiensis strains targeting lepidopteran or coleopteran insects (Guerchicoff et al. (1997) Appl. Environ. Microbiol. 63: 2716-2721).

[0020] The structure of Cyt2A, solved by X-ray crystallography, shows a single domain where two outer layers of α-helix wrap around a mixed β-sheet. Further available crystal structures of Cyt toxins support a conserved α-β structural model with two α-helix hairpins flanking a β-sheet core containing seven to eight β-strands. (Cohen et al. (2011) J. Mol. Biol. 413: 80 4-814) Mutagenic studies identified β-sheet residues as critical for toxicity, while mutations in the helical domains did not affect toxicity (Adang et al.; Diversity of Bacillus thuringiensis Crystal Toxins and Mechanism of Action. In: T. S. Dhadialla and S. S. Gill, eds, Advances in Insect Physiology, Vol. 47, Oxford: Academic Press, 2014, pp. 39-87.) The representative domain of the Cyt toxin is a δ-endotoxin, Bac_thur_toxin (Pfam PF01338).

[0021] There are multiple proposed models for the mode of action of Cyt toxins, and it is still an area of active investigation. Some Cyt proteins (Cyt1A) have been shown to require the presence of accessory proteins for crystallization. Cyt1A and Cyt2A protoxins are processed by digestive proteases at the same sites in the N- and C-termini to a stable toxin core. Cyt toxins then interact with non-saturated membrane lipids, such as phosphatidylcholine, phosphatidylethanolamine, and sphingomyelin. For Cyt toxins, pore-formation and detergent-like membrane disruption have been proposed as non-exclusive mechanisms; and it is generally accepted that both may occur depending on toxin concentration, with lower concentrations favoring oligomeric pores and higher concentrations leading to membrane breaks. (Butko (2003) Appl. Environ. Microbiol. 69: 2415-2422) In the pore-formation model, the Cyt toxin binds to the cell membrane, inducing the formation of cation-selective channels in the membrane vesicles leading to colloid-osmotic lysis of the cell. (Knowles et al. (1989) FEBS Lett. 244: 259-262; Knowles et al. (1992) Proc. R. Soc. Ser. B. 248: 1-7 and Promdonkoy et al. (2003) Biochem. J. 374: 255-259). In the detergent model, there is a nonspecific aggregation of the toxin on the surface of the lipid bilayer leading to membrane disassembly and cell death. (Butko (2003) supra; Manceva et al. (2005) Biochem. 44: 589-597).

[0022] Multiple studies have shown synergistic activity between Cyt toxins and other B. thuringiensis toxins, particularly the Cry, Bin, and Mtx toxins. This synergism has even been shown to overcome an insect's resistance to the other toxin. (Wirth 1997, Wirth 2005, Thiery 1998, Zhang 2006) The Cyt synergistic effect for Cry toxins is proposed to involve Cyt1A binding to domain II of Cry toxins in solution or on the membrane plane to promote formation of a Cry toxin pre-pore oligomer. Formation of this oligomer is independent of the Cyt oligomerization, binding or insertion. (Lailak 2013, Perez 2007, Lopez-Diaz 2013)

[0023] A number of pesticidal proteins unrelated to the Cry proteins are produced by some strains of B. thuringiensis and B. cereus during vegetative growth (Estruch et al. (1996) Proc Natl Acad Sci USA 93:5389-5394; Warren et al. (1994) WO 94/21795). These vegetative insecticidal proteins, or Vips, do not form parasporal crystal proteins and are apparently secreted from the cell. The Vips are presently excluded from the Cry protein nomenclature because they are not crystal-forming proteins. The term VIP is a misnomer in the sense that some B. thuringiensis Cry proteins are also produced during vegetative growth as well as during the stationary and sporulation phases, most notably Cry3Aa. The location of the Vip genes in the B. thuringiensis genome has been reported to reside on large plasmids that also encode cry genes (Mesrati et al. (2005) FEMS Microbiol. Lett. 244(2):353-8). A web-site for the nomenclature of Bt toxins can be found on the world wide web at lifesci.sussex.ac.uk with the path “/home/Neil_Crickmore/Bt/” and at: “btnomenclature.info/”. See also, Schnepf et al. (1998) Microbiol. Mol. Biol. Rev. 62(3):775-806. Such references are herein incorporated by reference.

[0024] To date four categories of Vips have been identified. Some Vip genes form binary two-component protein complexes; an “A” component is usually the “active” portion, and a “B” component is usually the “binding” portion. (Pfam pfam.xfam.org/family/PF03495). The Vip1 and Vip4 proteins generally contain binary toxin B protein domains. Vip2 proteins generally contain binary toxin A protein domains.

[0025] The Vip1 and Vip2 proteins are the two components of a binary toxin that exhibits toxicity to coleopterans. Vip1Aa1 and Vip2Aa1 are very active against corn rootworms, particularly Diabrotica virgifera and Diabrotica longicornis (Han et al. (1999) Nat. Struct. Biol. 6:932-936; Warren GW (1997) “Vegetative insecticidal proteins: novel proteins for control of corn pests” In: Carozzi NB, Koziel M (eds) Advances in insect control, the role of transgenic plants; Taylor & Francis Ltd, London, pp 109-21). The membrane-binding 95 kDa Vip1 multimer provides a pathway for the 52 kDa Vip2 ADP-ribosylase to enter the cytoplasm of target western corn rootworm cells (Warren (1997) supra). The NAD-dependent ADP-ribosyltransferase Vip2 likely modifies monomeric actin at Arg177 to block polymerization, leading to loss of the actin cytoskeleton and eventual cell death due to the rapid subunit ex-change within actin filaments in vivo (Carlier M. F. (1990) Adv. Biophys. 26:51-73).

[0026] Like Cry toxins, activated Vip3A toxins are pore-forming proteins capable of making stable ion channels in the membrane (Lee et al. (2003) Appl. Environ. Microbiol. 69:4648-4657). Vip3 proteins are active against several major lepidopteran pests (Rang et al. (2005) Appl. Environ. Microbiol. 71(10):6276-6281; Bhalla et al. (2005) FEMS Microbiol. Lett. 243:467-472; Estruch et al. (1998) WO 9844137; Estruch et al. (1996) Proc Natl Acad Sci USA 93:5389-5394; Selvapandiyan et al. (2001) Appl. Environ Microbiol. 67:5855-5858; Yu et al. (1997) Appl. Environ Microbiol. 63:532-536). Vip3A is active against Agrotis ipsilon, Spodoptera frupperda, Spodoptera exigua, Heliothis virescens, and Helicoverpa zea (Warren et al. (1996) WO 96/10083; Estruch et al. (1996) Proc Natl Acad Sci USA 93:5389-5394). Like Cry toxins, Vip3A proteins must be activated by proteases prior to recognition at the surface of the midgut epithelium of specific membrane proteins different from those recognized by Cry toxins.

[0027] The MTX family of toxin proteins is characterized by the presence of a conserved domain, ETX_MTX2 (pfam 03318). Members of this family share sequence homology with the mosquitocidal toxins Mtx2 and Mtx3 from Bacillus sphaericus, as well as with the epsilon toxin ETX from Clostridium perfringens (Cole et al. (2004) Nat. Struct. Mol. Biol. 11: 797-8; Thanabalu et al. (1996) Gene 170:85-9). The MTX-like proteins are structurally distinct from the three-domain Cry toxins, as they have an elongated and predominately β-sheet-based structure. However, similar to the three-domain toxins, the MTX-like proteins are thought to form pores in the membranes of target cells (Adang et al. (2014) supra). Unlike the three-domain Cry proteins, the MTX-like proteins are much smaller in length, ranging from 267 amino acids (Cry23) to 340 amino acids (Cry15A).

[0028] To date, only 15 proteins belonging to the family of MTX-like toxins have been assigned Cry names, making this a relatively small class compared to the three-domain Cry family (Crickmore et al. (2014) supra; Adang et al. (2014) supra). The members of the MTX-like toxin family include Cry15, Cry23, Cry33, Cry38, Cry45, Cry46, Cry51, Cry60A, Cry60B, and Cry64. This family exhibits a range of insecticidal activity, including activity against insect pests of the Lepidopteran and Coleopteran orders. Some members of this family may form binary partnerships with other proteins, which may or may not be required for insecticidal activity.

[0029] Cry15 is a 34 kDA protein that was identified in Bacillus thuringiensis serovar thompsoni HD542; it occurs naturally in a crystal together with an unrelated protein of approximately 40 kDa. The gene encoding Cry 15 and its partner protein are arranged together in an operon. Cry15 alone has been shown to have activity against lepidopteran insect pests including Manduca sexta, Cydia pomonella, and Pieris rapae, with the presence of the 40 kDA protein having been shown to increase activity of Cry15 only against C. pomonella (Brown K. and Whiteley H. (1992) J. Bacteriol. 174:549-557; Naimov et al. (2008) Appl. Environ. Microbiol. 74:7145-7151). Further studies are needed to elucidate the function of the partner protein of Cry15. Similarly, Cry23 is a 29 kDA protein that has been shown to have activity against the coleopteran pests Tribolium castaneum and Popillia japonica together with its partner protein Cry37 (Donovan et al. (2000) U.S. Pat. No. 6,063,756).

[0030] New members of the MTX-like family are continuing to be identified. An ETX_MTX toxin gene was recently identified in the genome of Bacillus thuringiensis serovar tolworthi strain Na205-3. This strain was found to be toxic against the lepidpoteran pest Helicoverpa armigera, and it also contained homologs of Cry1, Cry11, Vip1, Vip2, and Vip3 (Palma et al. (2014) Genome Announc. 2(2): e00187-14. Published online Mar. 13, 2014 at doi: 10.1128/genomeA.00187-14; PMCID: PMC3953196). Because the MTX-like proteins have a unique domain structure relative to the three-domain Cry proteins, they are believed to possess a unique mode of action, thereby making them a valuable tool in insect control and the fight against insect resistance.

[0031] Bacterial cells produce large numbers of toxins with diverse specificity against host and non-host organisms. Large families of binary toxins have been identified in numerous bacterial families, including toxins that have activity against insect pests. (Poopathi and Abidha (2010) J. Physiol. Path. 1(3): 22-38). Lysinibacillus sphaericus (Ls), formerly Bacillus sphaericus, (Ahmed et al. (2007) Int. J. Syst. Evol. Microbiol. 57:1117-1125) is well-known as an insect biocontrol strain. Ls produces several insecticidal proteins, including the highly potent binary complex BinA/BinB. This binary complex forms a parasporal crystal in Ls cells and has strong and specific activity against dipteran insects, specifically mosquitos. In some areas, insect resistance to existing Ls mosquitocidal strains has been reported. The discovery of new binary toxins with different target specificity or the ability to overcome insect resistance is of significant interest.

[0032] The Ls binary insecticidal protein complex contains two major polypeptides, a 42 kDa polypeptide and a 51 kDa polypepdide, designated BinA and BinB, respectively (Ahmed et al. (2007) supra). The two polypeptides act synergistically to confer toxicity to their targets. Mode of action involves binding of the proteins to receptors in the larval midgut. In some cases, the proteins are modified by protease digestion in the larval gut to produce activated forms. The BinB component is thought to be involved in binding, while the BinA component confers toxicity (Nielsen-LeRoux et al. (2001) Appl. Environ. Microbiol. 67(11):5049-5054). When cloned and expressed separately, the BinA component is toxic to mosquito larvae, while the BinB component is not. However, co-administration of the proteins markedly increases toxicity (Nielsen-LeRoux et al. (2001) supra).

[0033] A small number of Bin protein homologs have been described from bacterial sources. Priest et al. (1997) Appl. Environ. Microbiol. 63(4):1195-1198 describe a hybridization effort to identify new Ls strains, although most of the genes they identified encoded proteins identical to the known BinA/BinB proteins. The BinA protein contains a defined conserved domain known as the Toxin 10 superfamily domain. This toxin domain was originally defined by its presence in BinA and BinB. The two proteins both have the domain, although the sequence similarity between BinA and BinB is limited in this region (<40%). The Cry49Aa protein, which also has insecticidal activity, also has this domain (described below).

[0034] The Cry48Aa/Cry49Aa binary toxin of Ls has the ability to kill Culex quinquefasciatus mosquito larvae. These proteins are in a protein structural class that has some similarity to the Cry protein complex of Bacillus thuringiensis (Bt), a well-known insecticidal protein family. The Cry34/Cry35 binary toxin of Bt is also known to kill insects, including Western corn rootworm, a significant pest of corn. Cry34, of which several variants have been identified, is a small (14 kDa) polypeptide, while Cry35 (also encoded by several variants) is a 44 kDa polypeptide. These proteins have some sequence homology with the BinA/BinB protein group and are thought to be evolutionarily related (Ellis et al. (2002) Appl. Environ. Microbiol. 68(3):1137-1145).

[0035] Phosphoinositide phospholipase C proteins (PI-PLC; also phosphotidylinositol phospholipase C) are members of the broader group of phospholipase C proteins. Many of these proteins play important roles in signal transduction as part of normal cell physiology. Several important bacterial toxins also contain domains with similarity to these proteins (Titball, R. W. (1993) Microbiological Reviews. 57(2):347-366). Importantly, these proteins are implicated in signal amplification during intoxication of insect cells by Bt Cry proteins (Valaitis, A. P. (2008) Insect Biochemistry and Molecular Biology. 38: 611-618).

[0036] The PI-PLC toxin class occurs in Bacillus isolates, commonly seen in co-occurrence with homologs to other described toxin classes, such as Binary Toxins. This class of sequences has homology to phosphatidylinositol phosphodiesterases (also referred to as phosphatidylinositol-specific phospholipase C—PI-PLC). The crystal structure and its active site were solved for B. cereus PI-PLC by Heinz et al (Heinz, et. al., (1995) The EMBO Journal. 14(16): 3855-3863). The roles of the B. cereus PI-PLC active site amino acid residues in catalysis and substrate binding were investigated by Gassier et al using site-directed mutagenesis, kinetics, and crystal structure analysis (Gassier, et. al., (1997) Biochemistry. 36(42):12802-13).

[0037] These PI-PLC toxin proteins contain a PLC-like phosphodiesterase, TIM beta/alpha-barrel domain (IPRO17946) and/or a Phospholipase C, phosphatidylinositol-specific, X domain (IPR000909) (also referred to as the PI-PLC X-box domain). We have also seen proteins with these domains in combination with other typical Bacillus protein toxin domains. This list includes most commonly a lectin domain (IPR000772), a sugar-binding domain that can be present in one or more copies and is thought to bind cell membranes, as well as the Insecticidal crystal toxin (IPR008872) (also referred to as Toxin10 or P42), which is the defining domain of the Binary Toxin.

[0038] Previously, toxins of this PI-PLC class were defined in U.S. Pat. No. 8,318,900 B2 SEQ ID NOs 30 (DNA) and 79 (amino acid), in U.S. Patent Publication No. 20110263488A1 SEQ ID NOs 8 (DNA) and 9 (amino acid), and in U.S. Pat. No. 8,461,421B2 SEQ ID NOs 3 (DNA) and 63 (amino acid).

[0039] Provided herein are pesticidal proteins from these classes of toxins. The pesticidal proteins are classified by their structure, homology to known toxins and/or their pesticidal specificity.

[0040] ii. Variants and Fragments of Pesticidal Proteins and Polynucleotides Encoding the Same

[0041] Pesticidal proteins or polypeptides of the invention include those set forth in SEQ ID NOs: 1, 2, 3, 4, 5, 6, 7, 8, 9, 10, 11, 12, 13, 14, 15, 16, 17, 18, 19, 20, 21, 22, 23, 24, 25, 26, 27, 28, 29, 30, 31, 32, 33, 34, 35, 36, 37, 38, 39, 40, 41, 42, 43, 44, 45, 46, 47, 48, 49, 50, 51, 52, 53, 54, 55, 56, 57, 58, 59, 60, 61, 62, 63, 64, 65, 66, 67, 68, 69, 70, 71, 72, 73, 74, 75, 76, 77, 78, 79, 80, 81, 82, 83, 84, 85, 86, 87, 88, 89, 90, 91, 92, 93, 94, 95, 96, 97, 98, 99, 100, 101, 102, 103, 104, 105, 106, 107, 108, 109, 110, 111, 112, 113, 114, 115, 116, 117, 118, 119, 120, 121, 122, 123, 124, 125, 126, 127, 128, 129, 130, 131, 132, 133, 134, 135, 136, 137, 138, 139, 140, 141, 142, 143, 144, 145, 146, 147, 148, 149, 150, 151, 152, 153, 154, 155, 156, 157, 158, 159, 160, 161, 162, 163, 164, 165, 166, 167, 168, 169, 170, 171, 172, 173, 174, 175, 176, 177, 178, 179, 180, 181, 182, 183, 184, 185, 186, 187, 188, 189, 190, 191, 192, 193, 194, 195, 196, 197, 198, 199, 200, 201, 202, 203, 204, 205, 206, 207, 208, 209, 210, 211, 212, 213, 214, 215, 216, 217, 218, 219, 220, 221, 222, 223, 224, 225, 226, 227, 228, 229 and fragments and variants thereof. By “pesticidal toxin” or “pesticidal protein” or “pesticidal polypeptide” is intended a toxin or protein or polypeptide that has activity against one or more pests, including, insects, fungi, nematodes, and the like such that the pest is killed or controlled.

[0042] An “isolated” or “purified” polypeptide or protein, or biologically active portion thereof, is substantially or essentially free from components that normally accompany or interact with the polypeptide or protein as found in its naturally occurring environment. Thus, an isolated or purified polypeptide or protein is substantially free of other cellular material, or culture medium when produced by recombinant techniques, or substantially free of chemical precursors or other chemicals when chemically synthesized. A protein that is substantially free of cellular material includes preparations of protein having less than about 30%, 20%, 10%, 5%, or 1% (by dry weight) of contaminating protein. When the protein of the invention or biologically active portion thereof is recombinantly produced, optimally culture medium represents less than about 30%, 20%, 10%, 5%, or 1% (by dry weight) of chemical precursors or non-protein-of-interest chemicals.

[0043] The term “fragment” refers to a portion of a polypeptide sequence of the invention. “Fragments” or “biologically active portions” include polypeptides comprising a sufficient number of contiguous amino acid residues to retain the biological activity, i.e., have pesticidal activity. Fragments of the pesticidal proteins include those that are shorter than the full-length sequences, either due to the use of an alternate downstream start site, or due to processing that produces a shorter protein having pesticidal activity. Processing may occur in the organism the protein is expressed in, or in the pest after ingestion of the protein. Examples of fragments of the proteins can be found in Table 1. A biologically active portion of a pesticidal protein can be a polypeptide that is, for example, 10, 25, 50, 100, 150, 200, 250 or more amino acids in length of any one of SEQ ID NO: 1, 2, 3, 4, 5, 6, 7, 8, 9, 10, 11, 12, 13, 14, 15, 16, 17, 18, 19, 20, 21, 22, 23, 24, 25, 26, 27, 28, 29, 30, 31, 32, 33, 34, 35, 36, 37, 38, 39, 40, 41, 42, 43, 44, 45, 46, 47, 48, 49, 50, 51, 52, 53, 54, 55, 56, 57, 58, 59, 60, 61, 62, 63, 64, 65, 66, 67, 68, 69, 70, 71, 72, 73, 74, 75, 76, 77, 78, 79, 80, 81, 82, 83, 84, 85, 86, 87, 88, 89, 90, 91, 92, 93, 94, 95, 96, 97, 98, 99, 100, 101, 102, 103, 104, 105, 106, 107, 108, 109, 110, 111, 112, 113, 114, 115, 116, 117, 118, 119, 120, 121, 122, 123, 124, 125, 126, 127, 128, 129, 130, 131, 132, 133, 134, 135, 136, 137, 138, 139, 140, 141, 142, 143, 144, 145, 146, 147, 148, 149, 150, 151, 152, 153, 154, 155, 156, 157, 158, 159, 160, 161, 162, 163, 164, 165, 166, 167, 168, 169, 170, 171, 172, 173, 174, 175, 176, 177, 178, 179, 180, 181, 182, 183, 184, 185, 186, 187, 188, 189, 190, 191, 192, 193, 194, 195, 196, 197, 198, 199, 200, 201, 202, 203, 204, 205, 206, 207, 208, 209, 210, 211, 212, 213, 214, 215, 216, 217, 218, 219, 220, 221, 222, 223, 224, 225, 226, 227, 228, 229. Such biologically active portions can be prepared by recombinant techniques and evaluated for pesticidal activity. As used here, a fragment comprises at least 8 contiguous amino acids of SEQ ID NOs: 1, 2, 3, 4, 5, 6, 7, 8, 9, 10, 11, 12, 13, 14, 15, 16, 17, 18, 19, 20, 21, 22, 23, 24, 25, 26, 27, 28, 29, 30, 31, 32, 33, 34, 35, 36, 37, 38, 39, 40, 41, 42, 43, 44, 45, 46, 47, 48, 49, 50, 51, 52, 53, 54, 55, 56, 57, 58, 59, 60, 61, 62, 63, 64, 65, 66, 67, 68, 69, 70, 71, 72, 73, 74, 75, 76, 77, 78, 79, 80, 81, 82, 83, 84, 85, 86, 87, 88, 89, 90, 91, 92, 93, 94, 95, 96, 97, 98, 99, 100, 101, 102, 103, 104, 105, 106, 107, 108, 109, 110, 111, 112, 113, 114, 115, 116, 117, 118, 119, 120, 121, 122, 123, 124, 125, 126, 127, 128, 129, 130, 131, 132, 133, 134, 135, 136, 137, 138, 139, 140, 141, 142, 143, 144, 145, 146, 147, 148, 149, 150, 151, 152, 153, 154, 155, 156, 157, 158, 159, 160, 161, 162, 163, 164, 165, 166, 167, 168, 169, 170, 171, 172, 173, 174, 175, 176, 177, 178, 179, 180, 181, 182, 183, 184, 185, 186, 187, 188, 189, 190, 191, 192, 193, 194, 195, 196, 197, 198, 199, 200, 201, 202, 203, 204, 205, 206, 207, 208, 209, 210, 211, 212, 213, 214, 215, 216, 217, 218, 219, 220, 221, 222, 223, 224, 225, 226, 227, 228, 229.

[0044] Bacterial genes, including those encoding the pesticidal proteins disclosed herein, quite often possess multiple methionine initiation codons in proximity to the start of the open reading frame. Often, translation initiation at one or more of these start codons will lead to generation of a functional protein. These start codons can include ATG codons. However, bacteria such as Bacillus sp. also recognize the codon GTG as a start codon, and proteins that initiate translation at GTG codons contain a methionine at the first amino acid. On rare occasions, translation in bacterial systems can initiate at a TTG codon, though in this event the TTG encodes a methionine. Furthermore, it is not often determined a priori which of these codons are used naturally in the bacterium. Thus, it is understood that use of one of the alternate methionine codons may also lead to generation of pesticidal proteins. These pesticidal proteins are encompassed in the present invention and may be used in the methods disclosed herein. It will be understood that, when expressed in plants, it will be necessary to alter the alternate start codon to ATG for proper translation.

[0045] In various embodiments the pesticidal proteins provided herein include amino acid sequences deduced from the full-length nucleotide sequences and amino acid sequences that are shorter than the full-length sequences due to the use of an alternate downstream start site. Thus, the nucleotide sequence of the invention and/or vectors, host cells, and plants comprising the nucleotide sequence of the invention (and methods of making and using the nucleotide sequence of the invention) may comprise a nucleotide sequence encoding an alternate start site.

[0046] It is recognized that modifications may be made to the pesticidal polypeptides provided herein creating variant proteins. Changes designed by man may be introduced through the application of site-directed mutagenesis techniques. Alternatively, native, as yet-unknown or as yet unidentified polynucleotides and/or polypeptides structurally and/or functionally-related to the sequences disclosed herein may also be identified that fall within the scope of the present invention. Conservative amino acid substitutions may be made in nonconserved regions that do not alter the function of the pesticidal proteins. Alternatively, modifications may be made that improve the activity of the toxin. Modification of Cry toxins by domain III swapping has resulted in some cases in hybrid toxins with improved toxicities against certain insect species. Thus, domain III swapping could be an effective strategy to improve toxicity of Cry toxins or to create novel hybrid toxins with toxicity against pests that show no susceptibility to the parental Cry toxins. Site-directed mutagenesis of domain II loop sequences may result in new toxins with increased insecticidal activity. Domain II loop regions are key binding regions of initial Cry toxins that are suitable targets for the mutagenesis and selection of Cry toxins with improved insecticidal properties. Domain I of the Cry toxin may be modified to introduce protease cleavage sites to improve activity against certain pests. Strategies for shuffling the three different domains among large numbers of cry genes and high throughput bioassay screening methods may provide novel Cry toxins with improved or novel toxicities.

[0047] As indicated, fragments and variants of the polypeptides disclosed herein will retain pesticidal activity. Pesticidal activity comprises the ability of the composition to achieve an observable effect diminishing the occurrence or an activity of the target pest, including for example, bringing about death of at least one pest, or a noticeable reduction in pest growth, feeding, or normal physiological development. Such decreases in numbers, pest growth, feeding or normal development can comprise any statistically significant decrease, including, for example a decrease of about 5%, 10%, 15%, 20%, 25%, 30%, 35%, 40%, 45%, 50%, 55%, 60%, 65%, 70%, 75%, 85%, 90%, 95% or greater. It is recognized that the pesticidal activity may be different or improved relative to the activity of the native protein, or it may be unchanged, so long as pesticidal activity is retained. Methods for measuring pesticidal activity are well known in the art. See, for example, Czapla and Lang (1990) J. Econ. Entomol. 83:2480-2485; Andrews et al. (1988) Biochem. J. 252:199-206; Marrone et al. (1985) J. of Economic Entomology 78:290-293; and U.S. Pat. No. 5,743,477, all of which are herein incorporated by reference in their entirety.

[0048] Polypeptide variants of this disclosure include polypeptides having an amino acid sequence that is at least about 60%, about 65%, about 70%, about 75%, about 80%, about 85%, about 86%, about 87%, about 88%, about 89%, about 90%, about 91%, about 92%, about 93%, about 94%, about 95%, about 96%, about 97%, about 98% or about 99% identical to the amino acid sequence of any of SEQ ID NOs: 1, 2, 3, 4, 5, 6, 7, 8, 9, 10, 11, 12, 13, 14, 15, 16, 17, 18, 19, 20, 21, 22, 23, 24, 25, 26, 27, 28, 29, 30, 31, 32, 33, 34, 35, 36, 37, 38, 39, 40, 41, 42, 43, 44, 45, 46, 47, 48, 49, 50, 51, 52, 53, 54, 55, 56, 57, 58, 59, 60, 61, 62, 63, 64, 65, 66, 67, 68, 69, 70, 71, 72, 73, 74, 75, 76, 77, 78, 79, 80, 81, 82, 83, 84, 85, 86, 87, 88, 89, 90, 91, 92, 93, 94, 95, 96, 97, 98, 99, 100, 101, 102, 103, 104, 105, 106, 107, 108, 109, 110, 111, 112, 113, 114, 115, 116, 117, 118, 119, 120, 121, 122, 123, 124, 125, 126, 127, 128, 129, 130, 131, 132, 133, 134, 135, 136, 137, 138, 139, 140, 141, 142, 143, 144, 145, 146, 147, 148, 149, 150, 151, 152, 153, 154, 155, 156, 157, 158, 159, 160, 161, 162, 163, 164, 165, 166, 167, 168, 169, 170, 171, 172, 173, 174, 175, 176, 177, 178, 179, 180, 181, 182, 183, 184, 185, 186, 187, 188, 189, 190, 191, 192, 193, 194, 195, 196, 197, 198, 199, 200, 201, 202, 203, 204, 205, 206, 207, 208, 209, 210, 211, 212, 213, 214, 215, 216, 217, 218, 219, 220, 221, 222, 223, 224, 225, 226, 227, 228, 229 and retain pesticidal activity. Note, Table 1 provides non-limiting examples of variant polypeptides (and polynucleotide encoding the same) for each of SEQ ID NOS: 1-229. A biologically active variant of a pesticidal polypeptide of the invention may differ by as few as about 1-15 amino acid residues, as few as about 1-10, such as about 6-10, as few as 5, as few as 4, as few as 3, as few as 2, or as few as 1 amino acid residue. In specific embodiments, the polypeptides can comprise an N′-terminal or a C′-terminal truncation, which can comprise at least a deletion of 10, 15, 20, 25, 30, 35, 40, 45, 50 amino acids or more from either the N′ or C′ terminal end of the polypeptide. Table 2 provides protein domains found in SEQ ID NOs: 1-229 based on PFAM data. Both the domain description and the positions within a given SEQ ID NO are provided in Table 2. In specific embodiments, the active variant comprising any one of SEQ ID NOs: 1-229 can comprise at least 70%, 75%, 76%, 77%, 78%, 79%, 80%, 81%, 82%, 83%, 84%, 85%, 86%, 87%, 88%, 89%, 90%, 91%, 92%, 93%, 94%, 95%, 96%, 97%, 98%, or 99% sequence identity to any one of SEQ ID NOs: 1-229 and further comprises at least one of the conserved domain set forth in Table 2. For example, in one embodiment, the active variant will comprise at least 70%, 75%, 76%, 77%, 78%, 79%, 80%, 81%, 82%, 83%, 84%, 85%, 86%, 87%, 88%, 89%, 90%, 91%, 92%, 93%, 94%, 95%, 96%, 97%, 98%, or 99% sequence identity to SEQ ID NO:1, and further comprises the native amino acids at positions 82-294.

TABLE 2
Summary of PFAM domains in each of SEQ ID NOs: 1-229

| | | Modification | PFAM | Domain | Domain Position | |
|---|---|---|---|---|---|---|
| APG ID | Seq ID | Type | Domain | Description | Start | Stop |
| PG00001 | Seq ID 1 | | PF03945 | Endotoxin N | 82 | 294 |
| | | | PF03944 | Endotoxin C | 471 | 608 |
| APG00001 | Seq ID 2 | Alternate start | PF03945 | Endotoxin N | 75 | 287 |
| modified | | | PF03944 | Endotoxin C | 464 | 601 |
| APG00001 | Seq ID 3 | Alternate start | PF03945 | Endotoxin N | 75 | 287 |
| modified | | and 3′ | PF03944 | Endotoxin C | 464 | 600 |
| | | Truncation | | | | |
| APG00003 | Seq ID 4 | | PF03945 | Endotoxin N | 73 | 299 |
| | | | PF00555 | Endotoxin M | 304 | 504 |
| | | | PF03944 | Endotoxin C | 514 | 649 |
| APG00003 | Seq ID 5 | Alternate start | PF03945 | Endotoxin N | 68 | 294 |
| modified | | | PF00555 | Endotoxin M | 299 | 499 |
| | | | PF03944 | Endotoxin C | 509 | 644 |
| APG00003 | Seq ID 6 | 3′ Truncation | PF03945 | Endotoxin N | 73 | 299 |
| modified | | | PF00555 | Endotoxin M | 304 | 504 |
| | | | PF03944 | Endotoxin C | 514 | 648 |
| APG00004 | Seq ID 7 | | PF03945 | Endotoxin N | 70 | 292 |
| | | | PF00555 | Endotoxin M | 297 | 506 |
| | | | PF03944 | Endotoxin C | 516 | 658 |
| APG00004 | Seq ID 8 | 3′ Truncation | PF03945 | Endotoxin N | 70 | 292 |
| modified | | | PF00555 | Endotoxin M | 297 | 506 |
| | | | PF03944 | Endotoxin C | 516 | 657 |
| APG00006 | Seq ID 9 | | PF03318 | ETX MTX2 | 35 | 259 |
| APG00006 | Seq ID 10 | Signal peptide | PF03318 | ETX MTX2 | 16 | 239 |
| modified | | removed | | | | |
| APG00007 | Seq ID 11 | | PF03945 | Endotoxin N | 75 | 338 |
| | | | PF00555 | Endotoxin M | 346 | 524 |
| | | | PF03944 | Endotoxin C | 541 | 680 |
| APG00007 | Seq ID 12 | Alternate start | PF03945 | Endotoxin N | 62 | 325 |
| modified | | | PF00555 | Endotoxin M | 333 | 511 |
| | | | PF03944 | Endotoxin C | 528 | 667 |
| APG00007 | Seq ID 13 | Alternate start | PF03945 | Endotoxin N | 62 | 325 |
| modified | | and 3′ | PF00555 | Endotoxin M | 333 | 512 |
| | | Truncation | PF03944 | Endotoxin C | 528 | 666 |
| APG00007 | Seq ID 14 | 3′ Truncation | PF03945 | Endotoxin N | 75 | 338 |
| modified | | | PF00555 | Endotoxin M | 346 | 525 |
| | | | PF03944 | Endotoxin C | 541 | 679 |
| APG00009 | Seq ID 15 | | PF03318 | ETX MTX2 | 159 | 372 |
| APG00009 | Seq ID 16 | Signal peptide | PF03318 | ETX MTX2 | 127 | 325 |
| modified | | removed | | | | |
| APG00011 | Seq ID 17 | | PF14200 | RicinB lectin 2 | 2 | 102 |
| | | | PF05431 | Toxin 10 | 156 | 353 |
| APG00011 | Seq ID 18 | Alternate start | PF14200 | RicinB lectin 2 | 1 | 98 |
| modified | | | PF05431 | Toxin 10 | 152 | 349 |
| APG00012 | Seq ID 19 | | PF03945 | Endotoxin N | 56 | 302 |
| APG00012 | Seq ID 20 | Alternate start | PF03945 | Endotoxin N | 53 | 299 |
| modified | | | | | | |
| APG00013 | Seq ID 22 | | PF03318 | ETX MTX2 | 24 | 293 |
| APG00013 | Seq ID 23 | Signal peptide | PF03318 | ETX MTX2 | 10 | 261 |
| modified | | removed | | | | |
| APG00015 | Seq ID 25 | | PF01338 | Bac thur toxin | 19 | 240 |
| APG00016 | Seq ID 26 | | PF03318 | ETX MTX2 | 52 | 290 |
| APG00016 | Seq ID 27 | Alternate start | PF03318 | ETX MTX2 | 39 | 276 |
| modified | | | | | | |
| APG00017 | Seq ID 28 | | PF01338 | Bac thur toxin | 10 | 205 |
| APG00018 | Seq ID 29 | | PF03318 | ETX MTX2 | 71 | 309 |
| APG00018 | Seq ID 30 | Signal peptide | PF03318 | ETX MTX2 | 36 | 274 |
| modified | | removed | | | | |
| APG00019 | Seq ID 31 | | PF03318 | ETX MTX2 | 36 | 254 |
| APG00019 | Seq ID 32 | Signal peptide | PF03318 | ETX MTX2 | 10 | 228 |
| modified | | removed | | | | |
| APG00020 | Seq ID 33 | | PF03318 | ETX MTX2 | 107 | 251 |
| APG00020 | Seq ID 34 | Signal peptide | PF03318 | ETX MTX2 | 75 | 260 |
| modified | | removed | | | | |
| APG00021 | Seq ID 35 | | PF03318 | ETX MTX2 | 43 | 256 |
| APG00021 | Seq ID 36 | Alternate start | PF03318 | ETX MTX2 | 38 | 251 |
| modified | | | | | | |
| APG00022 | Seq ID 37 | | PF03318 | ETX MTX2 | 32 | 254 |
| APG00022 | Seq ID 38 | Alternate start | PF03318 | ETX MTX2 | 29 | 251 |
| modified | | | | | | |
| APG00024 | Seq ID 39 | | PF05791 | Bacillus HBL | 66 | 207 |
| APG00024 | Seq ID 40 | Alternate start | PF05791 | Bacillus HBL | 60 | 201 |
| modified | | | | | | |
| APG00025 | Seq ID 41 | | PF03945 | Endotoxin N | 100 | 340 |
| | | | PF03944 | Endotoxin C | 532 | 669 |
| APG00025 | Seq ID 42 | 3′ Truncation | PF03945 | Endotoxin N | 100 | 340 |
| modified | | | PF03944 | Endotoxin C | 532 | 668 |
| APG00026 | Seq ID 43 | | PF03945 | Endotoxin N | 61 | 296 |
| | | | PF00555 | Endotoxin M | 307 | 514 |
| | | | PF03944 | Endotoxin C | 524 | 657 |
| | | | PF14200 | RicinB lectin 2 | 702 | 804 |
| APG00026 | Seq ID 44 | Alternate start | PF03945 | Endotoxin N | 58 | 293 |
| modified | | and 3′ | PF00555 | Endotoxin M | 304 | 511 |
| | | Truncation | PF03944 | Endotoxin C | 521 | 654 |
| APG00026 | Seq ID 45 | Alternate start | PF03945 | Endotoxin N | 58 | 293 |
| modified | | | PF00555 | Endotoxin M | 304 | 511 |
| | | | PF03944 | Endotoxin C | 521 | 654 |
| | | | PF14200 | RicinB lectin 2 | 699 | 801 |
| APG00026 | Seq ID 46 | 3′ Truncation | PF03945 | Endotoxin N | 61 | 296 |
| modified | | | PF00555 | Endotoxin M | 307 | 514 |
| | | | PF03944 | Endotoxin C | 524 | 657 |
| APG00028 | Seq ID 47 | | PF03945 | Endotoxin N | 61 | 291 |
| | | | PF00555 | Endotoxin M | 296 | 498 |
| | | | PF03944 | Endotoxin C | 508 | 641 |
| APG00028 | Seq ID 48 | 3′ Truncation | PF03945 | Endotoxin N | 61 | 291 |
| modified | | | PF00555 | Endotoxin M | 296 | 498 |
| | | | PF03944 | Endotoxin C | 508 | 640 |
| APG00029 | Seq ID 49 | | PF03945 | Endotoxin N | 32 | 248 |
| APG00030 | Seq ID 50 | | PF03945 | Endotoxin N | 58 | 304 |
| | | | PF00030 | Crystall | 735 | 815 |
| | | | PF00652 | Ricin B lectin | 825 | 958 |
| APG00030 | Seq ID 51 | Alternate start | PF03945 | Endotoxin N | 48 | 294 |
| modified | | | PF00030 | Crystall | 725 | 805 |
| | | | PF00652 | Ricin B lectin | 815 | 948 |
| APG00031 | Seq ID 52 | | PF03945 | Endotoxin N | 65 | 287 |
| | | | PF00555 | Endotoxin M | 292 | 500 |
| | | | PF03944 | Endotoxin C | 510 | 653 |
| APG00031 | Seq ID 53 | 3′ Truncation | PF03945 | Endotoxin N | 65 | 287 |
| modified | | | PF00555 | Endotoxin M | 292 | 500 |
| | | | PF03944 | Endotoxin C | 510 | 652 |
| APG00032 | Seq ID 54 | | PF03945 | Endotoxin N | 100 | 355 |
| | | | PF03944 | Endotoxin C | 550 | 676 |
| APG00032 | Seq ID 55 | Signal peptide | PF03945 | Endotoxin N | 70 | 325 |
| modified | | removed and 3′ | PF03944 | Endotoxin C | 520 | 645 |
| | | Truncation | | | | |
| APG00032 | Seq ID 56 | Signal peptide | PF03945 | Endotoxin N | 70 | 325 |
| modified | | removed | PF03944 | Endotoxin C | 520 | 646 |
| APG00033 | Seq ID 57 | | PF12495 | Vip3A N | 16 | 188 |
| | | | PF02018 | CBM 4 9 | 543 | 656 |
| APG00035 | Seq ID 58 | | PF14200 | RicinB lectin 2 | 53 | 150 |
| | | | PF05431 | Toxin 10 | 156 | 353 |
| APG00035 | Seq ID 59 | Alternate start | PF14200 | RicinB lectin 2 | 44 | 146 |
| modified | | | PF05431 | Toxin 10 | 152 | 349 |
| APG00036 | Seq ID 60 | | PF03318 | ETX MTX2 | 30 | 252 |
| APG00036 | Seq ID 61 | Alternate start | PF03318 | ETX MTX2 | 30 | 252 |
| modified | | | | | | |
| APG00040 | Seq ID 62 | | PF03945 | Endotoxin N | 63 | 302 |
| | | | PF00555 | Endotoxin M | 307 | 522 |
| | | | PF03944 | Endotoxin C | 532 | 667 |
| APG00040 | Seq ID 63 | 3′ Truncation | PF03945 | Endotoxin N | 63 | 302 |
| modified | | | PF00555 | Endotoxin M | 307 | 522 |
| | | | PF03944 | Endotoxin C | 532 | 666 |
| APG00041 | Seq ID 64 | | PF03945 | Endotoxin N | 63 | 315 |
| | | | PF00555 | Endotoxin M | 322 | 507 |
| | | | PF03944 | Endotoxin C | 517 | 650 |
| | | | PF00652 | Ricin B lectin | 662 | 789 |
| APG00041 | Seq ID 65 | 3′ Truncation | PF03945 | Endotoxin N | 63 | 315 |
| modified | | | PF00555 | Endotoxin M | 322 | 507 |
| | | | PF03944 | Endotoxin C | 517 | 649 |
| APG00042 | Seq ID 67 | | PF03945 | Endotoxin N | 43 | 301 |
| | | | PF03944 | Endotoxin C | 509 | 642 |
| APG00042 | Seq ID 68 | 3′ Truncation | PF03945 | Endotoxin N | 43 | 301 |
| modified | | | PF03944 | Endotoxin C | 509 | 641 |
| APG00043 | Seq ID 69 | | PF03945 | Endotoxin N | 128 | 333 |
| APG00043 | Seq ID 70 | Signal peptide | PF03945 | Endotoxin N | 91 | 296 |
| modified | | removed | | | | |
| APG00044 | Seq ID 71 | | PF03945 | Endotoxin N | 45 | 267 |
| | | | PF00555 | Endotoxin M | 272 | 455 |
| | | | PF03944 | Endotoxin C | 465 | 606 |
| | | | PF14200 | RicinB lectin 2 | 649 | 748 |
| APG00044 | Seq ID 72 | 3′ Truncation | PF03945 | Endotoxin N | 45 | 267 |
| modified | | | PF00555 | Endotoxin M | 272 | 455 |
| | | | PF03944 | Endotoxin C | 465 | 605 |
| APG00045 | Seq ID 73 | | PF03945 | Endotoxin N | 120 | 359 |
| | | | PF03944 | Endotoxin C | 550 | 685 |
| | | | PF01473 | CW binding 1 | 737 | 754 |
| | | | PF01473 | CW binding 1 | 767 | 783 |
| | | | PF01473 | CW binding 1 | 795 | 812 |
| | | | PF01473 | CW binding 1 | 825 | 841 |
| APG00045 | Seq ID 74 | Signal peptide | PF03945 | Endotoxin N | 96 | 335 |
| modified | | removed and 3′ | PF03944 | Endotoxin C | 526 | 660 |
| | | Truncation | | | | |
| APG00045 | Seq ID 75 | Signal peptide | PF03945 | Endotoxin N | 96 | 335 |
| modified | | removed | PF03944 | Endotoxin C | 526 | 661 |
| | | | PF01473 | CW binding 1 | 713 | 730 |
| | | | PF01473 | CW binding 1 | 743 | 759 |
| | | | PF01473 | CW binding 1 | 771 | 788 |
| | | | PF01473 | CW binding 1 | 801 | 817 |
| APG00045 | Seq ID 76 | 3′ Truncation | PF03945 | Endotoxin N | 120 | 359 |
| modified | | | PF03944 | Endotoxin C | 550 | 684 |
| APG00047 | Seq ID 77 | | PF05431 | Toxin 10 | 76 | 267 |
| APG00049 | Seq ID 78 | | PF03318 | ETX MTX2 | 28 | 288 |
| APG00049 | Seq ID 79 | Signal peptide | PF03318 | ETX MTX2 | 9 | 260 |
| modified | | removed | | | | |
| APG00050 | Seq ID 80 | | PF05431 | Toxin 10 | 213 | 407 |
| APG00051 | Seq ID 81 | | PF03318 | ETX MTX2 | 122 | 297 |
| APG00051 | Seq ID 82 | Signal peptide | PF03318 | ETX MTX2 | 78 | 254 |
| modified | | removed | | | | |
| APG00053 | Seq ID 83 | | PF03945 | Endotoxin N | 76 | 281 |
| | | | PF01473 | CW binding 1 | 297 | 311 |
| | | | PF01473 | CW binding 1 | 380 | 395 |
| | | | PF01473 | CW binding 1 | 434 | 448 |
| APG00054 | Seq ID 84 | | PF03945 | Endotoxin N | 63 | 302 |
| | | | PF00555 | Endotoxin M | 307 | 522 |
| | | | PF03944 | Endotoxin C | 532 | 666 |
| APG00054 | Seq ID 85 | 3′ Truncation | PF03945 | Endotoxin N | 63 | 302 |
| modified | | | PF00555 | Endotoxin M | 307 | 522 |
| | | | PF03944 | Endotoxin C | 532 | 665 |
| APG00055 | Seq ID 86 | | PF03318 | ETX MTX2 | 96 | 334 |
| APG00055 | Seq ID 87 | Signal peptide | PF03318 | ETX MTX2 | 67 | 305 |
| modified | | removed | | | | |
| APG00057 | Seq ID 88 | | PF03945 | Endotoxin N | 66 | 319 |
| | | | PF00555 | Endotoxin M | 324 | 520 |
| | | | PF03944 | Endotoxin C | 530 | 666 |
| APG00057 | Seq ID 89 | 3′ Truncation | PF03945 | Endotoxin N | 66 | 319 |
| modified | | | PF00555 | Endotoxin M | 324 | 520 |
| | | | PF03944 | Endotoxin C | 530 | 665 |
| APG00060 | Seq ID 90 | | PF00652 | Ricin B lectin | 9 | 83 |
| | | | PF05431 | Toxin 10 | 78 | 278 |
| APG00060 | Seq ID 91 | Alternate start | PF00652 | Ricin B lectin | 8 | 82 |
| modified | | | PF05431 | Toxin 10 | 77 | 277 |
| APG00061 | Seq ID 92 | | PF03945 | Endotoxin N | 65 | 315 |
| | | | PF03944 | Endotoxin C | 528 | 667 |
| APG00061 | Seq ID 93 | 3′ Truncation | PF03945 | Endotoxin N | 65 | 315 |
| modified | | | PF03944 | Endotoxin C | 528 | 666 |
| APG00061 | Seq ID 94 | | PF14200 | RicinB lectin 2 | 355 | 460 |
| Split-Cry C- | | | | | | |
| term | | | | | | |
| APG00063 | Seq ID 95 | | PF05431 | Toxin 10 | 220 | 412 |
| APG00069 | Seq ID 96 | | PF03945 | Endotoxin N | 1 | 133 |
| | | | PF00555 | Endotoxin M | 138 | 335 |
| | | | PF03944 | Endotoxin C | 345 | 495 |
| APG00069 | Seq ID 97 | Alternate start | PF03945 | Endotoxin N | 1 | 133 |
| modified | | | PF00555 | Endotoxin M | 138 | 335 |
| | | | PF03944 | Endotoxin C | 345 | 495 |
| APG00069 | Seq ID 98 | 3′ Truncation | PF03945 | Endotoxin N | 1 | 133 |
| modified | | | PF00555 | Endotoxin M | 138 | 335 |
| | | | PF03944 | Endotoxin C | 345 | 494 |
| APG00077 | Seq ID 99 | | PF12495 | Vip3A N | 16 | 188 |
| | | | PF02018 | CBM 4 9 | 549 | 663 |
| APG00077 | Seq ID 100 | Alternate start | PF12495 | Vip3A N | 14 | 186 |
| modified | | | PF02018 | CBM 4 9 | 547 | 661 |
| APG00080 | Seq ID 101 | | PF03945 | Endotoxin N | 2 | 173 |
| | | | PF03944 | Endotoxin C | 346 | 481 |
| APG00080 | Seq ID 102 | Alternate start | PF03945 | Endotoxin N | 2 | 173 |
| modified | | | PF03944 | Endotoxin C | 346 | 481 |
| APG00080 | Seq ID 103 | Alternate start | PF03945 | Endotoxin N | 2 | 173 |
| modified | | and 3′ | PF03944 | Endotoxin C | 346 | 479 |
| | | Truncation | | | | |
| APG00080 | Seq ID 104 | 3′ Truncation | PF03945 | Endotoxin N | 2 | 173 |
| modified | | | PF03944 | Endotoxin C | 346 | 479 |
| APG00081 | Seq ID 105 | | PF03945 | Endotoxin N | 75 | 309 |
| | | | PF00555 | Endotoxin M | 317 | 516 |
| | | | PF03944 | Endotoxin C | 536 | 699 |
| APG00081 | Seq ID 106 | 3′ Truncation | PF03945 | Endotoxin N | 75 | 309 |
| modified | | | PF00555 | Endotoxin M | 317 | 516 |
| | | | PF03944 | Endotoxin C | 536 | 698 |
| APG00082 | Seq ID 107 | | PF03945 | Endotoxin N | 120 | 337 |
| | | | PF03945 | Endotoxin N | 330 | 416 |
| | | | PF00555 | Endotoxin M | 421 | 639 |
| | | | PF03944 | Endotoxin C | 649 | 789 |
| APG00082 | Seq ID 108 | Alternate start | PF03945 | Endotoxin N | 110 | 327 |
| modified | | | PF03945 | Endotoxin N | 320 | 406 |
| | | | PF00555 | Endotoxin M | 411 | 629 |
| | | | PF03944 | Endotoxin C | 639 | 779 |
| APG00082 | Seq ID 109 | Alternate start | PF03945 | Endotoxin N | 110 | 327 |
| modified | | and 3′ | PF03945 | Endotoxin N | 320 | 406 |
| | | Truncation | PF00555 | Endotoxin M | 411 | 629 |
| | | | PF03944 | Endotoxin C | 639 | 778 |
| APG00082 | Seq ID 110 | 3′ Truncation | PF03945 | Endotoxin N | 120 | 337 |
| modified | | | PF03945 | Endotoxin N | 330 | 416 |
| | | | PF00555 | Endotoxin M | 421 | 639 |
| | | | PF03944 | Endotoxin C | 649 | 788 |
| APG00083 | Seq ID 111 | | PF03945 | Endotoxin N | 65 | 297 |
| | | | PF03944 | Endotoxin C | 495 | 632 |
| APG00083 | Seq ID 112 | 3′ Truncation | PF03945 | Endotoxin N | 65 | 297 |
| modified | | | PF03944 | Endotoxin C | 495 | 631 |
| APG00086 | Seq ID 113 | | PF03945 | Endotoxin N | 71 | 281 |
| | | | PF03945 | Endotoxin N | 283 | 330 |
| | | | PF00555 | Endotoxin M | 337 | 545 |
| | | | PF03944 | Endotoxin C | 555 | 687 |
| APG00086 | Seq ID 114 | Alternate start | PF03945 | Endotoxin N | 71 | 281 |
| modified | | | PF03945 | Endotoxin N | 283 | 330 |
| | | | PF00555 | Endotoxin M | 337 | 545 |
| | | | PF03944 | Endotoxin C | 555 | 687 |
| APG00086 | Seq ID 115 | 3′ Truncation | PF03945 | Endotoxin N | 71 | 281 |
| modified | | | PF03945 | Endotoxin N | 283 | 330 |
| | | | PF00555 | Endotoxin M | 337 | 545 |
| | | | PF03944 | Endotoxin C | 555 | 686 |
| APG00088 | Seq ID 116 | | PF03945 | Endotoxin N | 38 | 264 |
| | | | PF00555 | Endotoxin M | 269 | 481 |
| | | | PF03944 | Endotoxin C | 491 | 621 |
| APG00088 | Seq ID 117 | 3′ Truncation | PF03945 | Endotoxin N | 38 | 264 |
| modified | | | PF00555 | Endotoxin M | 269 | 481 |
| | | | PF03944 | Endotoxin C | 491 | 620 |
| APG00089 | Seq ID 118 | | PF03945 | Endotoxin N | 68 | 320 |
| | | | PF00555 | Endotoxin M | 325 | 430 |
| | | | PF03944 | Endotoxin C | 501 | 638 |
| APG00089 | Seq ID 119 | 3′ Truncation | PF03945 | Endotoxin N | 68 | 320 |
| modified | | | PF00555 | Endotoxin M | 325 | 431 |
| | | | PF03944 | Endotoxin C | 501 | 637 |
| APG00091 | Seq ID 120 | | PF03318 | ETX MTX2 | 36 | 256 |
| APG00091 | Seq ID 121 | Alternate start | PF03318 | ETX MTX2 | 32 | 251 |
| modified | | | | | | |
| APG00092 | Seq ID 122 | | PF03318 | ETX MTX2 | 56 | 319 |
| APG00092 | Seq ID 123 | Signal peptide | PF03318 | ETX MTX2 | 26 | 290 |
| modified | | removed | | | | |
| APG00093 | Seq ID 124 | | PF03945 | Endotoxin N | 27 | 267 |
| | | | PF00555 | Endotoxin M | 272 | 463 |
| | | | PF03944 | Endotoxin C | 473 | 541 |
| APG00096 | Seq ID 125 | | PF03945 | Endotoxin N | 56 | 301 |
| | | | PF00030 | Crystall | 652 | 731 |
| | | | PF00030 | Crystall | 732 | 814 |
| | | | PF14200 | RicinB lectin 2 | 854 | 961 |
| APG00096 | Seq ID 126 | Alternate start | PF03945 | Endotoxin N | 53 | 298 |
| modified | | | PF00030 | Crystall | 649 | 728 |
| | | | PF00030 | Crystall | 729 | 811 |
| | | | PF14200 | RicinB lectin 2 | 851 | 958 |
| APG00096 | Seq ID 127 | Alternate start | PF03945 | Endotoxin N | 53 | 298 |
| modified | | and 3′ | PF00030 | Crystall | 649 | 728 |
| | | Truncation | PF00030 | Crystall | 729 | 811 |
| APG00098 | Seq ID 128 | | PF03318 | ETX MTX2 | 5 | 309 |
| APG00098 | Seq ID 129 | Alternate start | PF03318 | ETX MTX2 | 5 | 273 |
| modified | | | | | | |
| APG00100 | Seq ID 130 | | PF03945 | Endotoxin N | 30 | 246 |
| APG00102 | Seq ID 131 | | PF03945 | Endotoxin N | 57 | 157 |
| | | | PF03945 | Endotoxin N | 144 | 308 |
| | | | PF09131 | Endotoxin mid | 310 | 509 |
| APG00103 | Seq ID 132 | | PF03945 | Endotoxin N | 64 | 302 |
| | | | PF00555 | Endotoxin M | 307 | 529 |
| | | | PF03944 | Endotoxin C | 539 | 682 |
| APG00103 | Seq ID 133 | 3′ Truncation | PF03945 | Endotoxin N | 64 | 302 |
| modified | | | PF00555 | Endotoxin M | 307 | 529 |
| | | | PF03944 | Endotoxin C | 539 | 681 |
| APG00106 | Seq ID 134 | | PF07691 | PA14 | 15 | 142 |
| | | | PF03495 | Binary toxB | 185 | 600 |
| | | | PF09259 | Fve | 831 | 920 |
| APG00109 | Seq ID 135 | | PF03945 | Endotoxin N | 104 | 339 |
| | | | PF00555 | Endotoxin M | 350 | 558 |
| | | | PF03944 | Endotoxin C | 568 | 705 |
| | | | PF14200 | RicinB lectin 2 | 748 | 849 |
| APG00109 | Seq ID 136 | Alternate start | PF03945 | Endotoxin N | 52 | 287 |
| modified | | and 3′ | PF00555 | Endotoxin M | 298 | 506 |
| | | Truncation | PF03944 | Endotoxin C | 516 | 648 |
| APG00109 | Seq ID 137 | Alternate start | PF03945 | Endotoxin N | 52 | 287 |
| modified | | | PF00555 | Endotoxin M | 298 | 506 |
| | | | PF03944 | Endotoxin C | 516 | 653 |
| | | | PF14200 | RicinB lectin 2 | 696 | 797 |
| APG00109 | Seq ID 138 | 3′ Truncation | PF03945 | Endotoxin N | 104 | 339 |
| modified | | | PF00555 | Endotoxin M | 350 | 558 |
| | | | PF03944 | Endotoxin C | 568 | 700 |
| APG00111 | Seq ID 139 | | PF03945 | Endotoxin N | 147 | 384 |
| | | | PF00555 | Endotoxin M | 389 | 585 |
| | | | PF03944 | Endotoxin C | 595 | 735 |
| APG00111 | Seq ID 140 | Alternate start | PF03945 | Endotoxin N | 56 | 293 |
| modified | | | PF00555 | Endotoxin M | 298 | 494 |
| | | | PF03944 | Endotoxin C | 504 | 644 |
| APG00111 | Seq ID 141 | 3′ Truncation | PF03945 | Endotoxin N | 147 | 384 |
| modified | | | PF00555 | Endotoxin M | 389 | 585 |
| | | | PF03944 | Endotoxin C | 595 | 734 |
| APG00122 | Seq ID 143 | | PF03945 | Endotoxin N | 67 | 320 |
| | | | PF00555 | Endotoxin M | 327 | 537 |
| | | | PF03944 | Endotoxin C | 547 | 680 |
| APG00122 | Seq ID 144 | Alternate start | PF03945 | Endotoxin N | 67 | 320 |
| modified | | | PF00555 | Endotoxin M | 327 | 537 |
| | | | PF03944 | Endotoxin C | 547 | 680 |
| APG00122 | Seq ID 145 | 3′ Truncation | PF03945 | Endotoxin N | 67 | 320 |
| modified | | | PF00555 | Endotoxin M | 327 | 537 |
| | | | PF03944 | Endotoxin C | 547 | 679 |
| APG00123 | Seq ID 146 | | PF03945 | Endotoxin N | 66 | 303 |
| | | | PF03945 | Endotoxin N | 342 | 383 |
| | | | PF00555 | Endotoxin M | 388 | 492 |
| | | | PF03944 | Endotoxin C | 621 | 761 |
| APG00123 | Seq ID 147 | Alternate start | PF03945 | Endotoxin N | 33 | 270 |
| modified | | and 3′ | PF03945 | Endotoxin N | 309 | 350 |
| | | Truncation | PF00555 | Endotoxin M | 355 | 460 |
| | | | PF03944 | Endotoxin C | 588 | 727 |
| APG00123 | Seq ID 148 | Alternate start | PF03945 | Endotoxin N | 33 | 270 |
| modified | | | PF03945 | Endotoxin N | 309 | 350 |
| | | | PF00555 | Endotoxin M | 355 | 459 |
| | | | PF03944 | Endotoxin C | 588 | 728 |
| APG00123 | Seq ID 149 | 3′ Truncation | PF03945 | Endotoxin N | 66 | 303 |
| modified | | | PF03945 | Endotoxin N | 342 | 383 |
| | | | PF00555 | Endotoxin M | 388 | 493 |
| | | | PF03944 | Endotoxin C | 621 | 760 |
| APG00125 | Seq ID 151 | | PF03945 | Endotoxin N | 58 | 291 |
| | | | PF00555 | Endotoxin M | 296 | 492 |
| | | | PF03944 | Endotoxin C | 502 | 633 |
| APG00125 | Seq ID 152 | 3′ Truncation | PF03945 | Endotoxin N | 58 | 291 |
| modified | | | PF00555 | Endotoxin M | 296 | 492 |
| | | | PF03944 | Endotoxin C | 502 | 632 |
| APG00126 | Seq ID 153 | | PF01338 | Bac thur toxin | 20 | 240 |
| APG00126 | Seq ID 154 | Alternate start | PF01338 | Bac thur toxin | 14 | 234 |
| modified | | | | | | |
| APG00127 | Seq ID 155 | | PF03945 | Endotoxin N | 65 | 287 |
| | | | PF00555 | Endotoxin M | 292 | 500 |
| | | | PF03944 | Endotoxin C | 510 | 653 |
| APG00127 | Seq ID 156 | 3′ Truncation | PF03945 | Endotoxin N | 65 | 287 |
| modified | | | PF00555 | Endotoxin M | 292 | 500 |
| | | | PF03944 | Endotoxin C | 510 | 652 |
| APG00128 | Seq ID 157 | | PF01338 | Bac thur toxin | 13 | 234 |
| APG00129 | Seq ID 158 | | PF03318 | ETX MTX2 | 119 | 351 |
| APG00129 | Seq ID 159 | Alternate start | PF03318 | ETX MTX2 | 119 | 351 |
| modified | | | | | | |
| APG00133 | Seq ID 160 | | PF03945 | Endotoxin N | 65 | 299 |
| | | | PF00555 | Endotoxin M | 304 | 510 |
| | | | PF03944 | Endotoxin C | 520 | 657 |
| APG00133 | Seq ID 161 | 3′ Truncation | PF03945 | Endotoxin N | 65 | 299 |
| modified | | | PF00555 | Endotoxin M | 304 | 510 |
| | | | PF03944 | Endotoxin C | 520 | 656 |
| APG00142 | Seq ID 162 | | PF03945 | Endotoxin N | 124 | 349 |
| APG00145 | Seq ID 163 | | PF03945 | Endotoxin N | 63 | 315 |
| | | | PF00555 | Endotoxin M | 322 | 507 |
| | | | PF03944 | Endotoxin C | 517 | 656 |
| | | | PF05588 | Botulinum HA-17 | 670 | 784 |
| APG00145 | Seq ID 164 | 3′ Truncation | PF03945 | Endotoxin N | 63 | 315 |
| modified | | | PF00555 | Endotoxin M | 322 | 507 |
| | | | PF03944 | Endotoxin C | 517 | 655 |
| APG00146 | Seq ID 166 | | PF03318 | ETX MTX2 | 70 | 298 |
| APG00146 | Seq ID 167 | Signal peptide | PF03318 | ETX MTX2 | 39 | 266 |
| modified | | removed | | | | |
| APG00147 | Seq ID 168 | | PF14200 | RicinB lectin 2 | 96 | 206 |
| | | | PF05431 | Toxin 10 | 215 | 409 |
| APG00147 | Seq ID 169 | Signal peptide | PF14200 | RicinB lectin 2 | 65 | 175 |
| modified | | removed | PF05431 | Toxin 10 | 184 | 378 |
| APG00148 | Seq ID 170 | | | | | |
| APG00149 | Seq ID 172 | | PF03945 | Endotoxin N | 71 | 300 |
| | | | PF00555 | Endotoxin M | 306 | 482 |
| | | | PF03944 | Endotoxin C | 492 | 658 |
| APG00149 | Seq ID 173 | 3′ Truncation | PF03945 | Endotoxin N | 71 | 300 |
| modified | | | PF00555 | Endotoxin M | 306 | 482 |
| | | | PF03944 | Endotoxin C | 492 | 657 |
| APG00151 | Seq ID 174 | | PF14200 | RicinB lectin 2 | 45 | 146 |
| | | | PF05431 | Toxin 10 | 152 | 350 |
| APG00151 | Seq ID 175 | Alternate start | PF14200 | RicinB lectin 2 | 45 | 146 |
| modified | | | PF05431 | Toxin 10 | 152 | 350 |
| APG00161 | Seq ID 176 | | PF03945 | Endotoxin N | 75 | 297 |
| | | | PF00555 | Endotoxin M | 302 | 510 |
| | | | PF03944 | Endotoxin C | 520 | 658 |
| | | | PF14200 | RicinB lectin 2 | 697 | 807 |
| APG00161 | Seq ID 177 | Alternate start | PF03945 | Endotoxin N | 70 | 292 |
| modified | | | PF00555 | Endotoxin M | 297 | 505 |
| | | | PF03944 | Endotoxin C | 515 | 653 |
| | | | PF14200 | RicinB lectin 2 | 692 | 802 |
| APG00161 | Seq ID 178 | Alternate start | PF03945 | Endotoxin N | 70 | 292 |
| modified | | and 3′ | PF00555 | Endotoxin M | 297 | 505 |
| | | Truncation | PF03944 | Endotoxin C | 515 | 652 |
| APG00161 | Seq ID 179 | 3′ Truncation | PF03945 | Endotoxin N | 75 | 297 |
| modified | | | PF00555 | Endotoxin M | 302 | 510 |
| | | | PF03944 | Endotoxin C | 520 | 657 |
| APG00167 | Seq ID 180 | | PF14200 | RicinB lectin 2 | 38 | 142 |
| | | | PF05431 | Toxin 10 | 316 | 510 |
| APG00169 | Seq ID 181 | | PF03945 | Endotoxin N | 59 | 290 |
| | | | PF00555 | Endotoxin M | 295 | 501 |
| | | | PF03944 | Endotoxin C | 511 | 653 |
| APG00169 | Seq ID 182 | 3′ Truncation | PF03945 | Endotoxin N | 59 | 290 |
| modified | | | PF00555 | Endotoxin M | 295 | 501 |
| | | | PF03944 | Endotoxin C | 511 | 652 |
| APG00174 | Seq ID 183 | | PF03318 | ETX MTX2 | 112 | 348 |
| APG00174 | Seq ID 184 | Alternate start | PF03318 | ETX MTX2 | 96 | 332 |
| modified | | | | | | |
| APG00174 | Seq ID 185 | Signal peptide | PF03318 | ETX MTX2 | 67 | 303 |
| modified | | removed | | | | |
| APG00179 | Seq ID 186 | | PF03945 | Endotoxin N | 49 | 281 |
| | | | PF00555 | Endotoxin M | 286 | 490 |
| | | | PF03944 | Endotoxin C | 500 | 647 |
| APG00179 | Seq ID 187 | 3′ Truncation | PF03945 | Endotoxin N | 49 | 281 |
| modified | | | PF00555 | Endotoxin M | 286 | 490 |
| | | | PF03944 | Endotoxin C | 500 | 646 |
| APG00185 | Seq ID 188 | | PF03945 | Endotoxin N | 64 | 299 |
| | | | PF00555 | Endotoxin M | 304 | 527 |
| | | | PF03944 | Endotoxin C | 537 | 675 |
| APG00185 | Seq ID 189 | 3′ Truncation | PF03945 | Endotoxin N | 64 | 299 |
| modified | | | PF00555 | Endotoxin M | 304 | 527 |
| | | | PF03944 | Endotoxin C | 537 | 674 |
| APG00185 | Seq ID 190 | | PF07029 | CryBP1 | 61 | 222 |
| CryBP1 | | | | | | |
| APG00191 | Seq ID 191 | | PF00652 | Ricin B lectin | 70 | 173 |
| | | | PF05431 | Toxin 10 | 167 | 362 |
| | | | PF03495 | Binary toxB | 234 | 352 |
| APG00199 | Seq ID 192 | | PF03945 | Endotoxin N | 101 | 322 |
| APG00201 | Seq ID 193 | | PF03318 | ETX MTX2 | 36 | 258 |
| APG00201 | Seq ID 194 | Alternate start | PF03318 | ETX MTX2 | 29 | 251 |
| modified | | | | | | |
| APG00202 | Seq ID 195 | | PF03318 | ETX MTX2 | 146 | 375 |
| APG00202 | Seq ID 196 | Signal peptide | PF03318 | ETX MTX2 | 100 | 329 |
| modified | | removed | | | | |
| APG00205 | Seq ID 197 | | PF03318 | ETX MTX2 | 71 | 309 |
| APG00205 | Seq ID 198 | Signal peptide | PF03318 | ETX MTX2 | 36 | 274 |
| modified | | removed | | | | |
| APG00206 | Seq ID 199 | | PF03945 | Endotoxin N | 62 | 307 |
| | | | PF03944 | Endotoxin C | 515 | 670 |
| APG00206 | Seq ID 200 | 3′ Truncation | PF03945 | Endotoxin N | 62 | 307 |
| modified | | | PF03944 | Endotoxin C | 515 | 669 |
| APG00208 | Seq ID 201 | | PF03318 | ETX MTX2 | 147 | 375 |
| APG00208 | Seq ID 202 | Alternate start | PF03318 | ETX MTX2 | 131 | 359 |
| modified | | | | | | |
| APG00222 | Seq ID 203 | | PF03945 | Endotoxin N | 43 | 284 |
| | | | PF00555 | Endotoxin M | 289 | 509 |
| | | | PF03944 | Endotoxin C | 519 | 658 |
| APG00222 | Seq ID 204 | Alternate start | PF03945 | Endotoxin N | 42 | 283 |
| modified | | | PF00555 | Endotoxin M | 288 | 508 |
| | | | PF03944 | Endotoxin C | 518 | 657 |
| APG00222 | Seq ID 205 | Alternate start | PF03945 | Endotoxin N | 42 | 283 |
| modified | | and 3′ | PF00555 | Endotoxin M | 288 | 508 |
| | | Truncation | PF03944 | Endotoxin C | 518 | 656 |
| APG00222 | Seq ID 206 | 3′ Truncation | PF03945 | Endotoxin N | 43 | 284 |
| modified | | | PF00555 | Endotoxin M | 289 | 509 |
| | | | PF03944 | Endotoxin C | 519 | 657 |
| APG00234 | Seq ID 207 | | PF03318 | ETX MTX2 | 45 | 315 |
| APG00234 | Seq ID 208 | Alternate start | PF03318 | ETX MTX2 | 32 | 298 |
| modified | | | | | | |
| APG00234 | Seq ID 209 | Signal peptide | PF03318 | ETX MTX2 | 8 | 265 |
| modified | | removed | | | | |
| APG00272 | Seq ID 210 | | PF03318 | ETX MTX2 | 36 | 297 |
| APG00272 | Seq ID 211 | Signal peptide | PF03318 | ETX MTX2 | 10 | 271 |
| modified | | removed | | | | |
| APG00299 | Seq ID 212 | | PF03318 | ETX MTX2 | 20 | 277 |
| APG00299 | Seq ID 213 | Signal peptide | PF03318 | ETX MTX2 | 9 | 253 |
| modified | | removed | | | | |
| APG00526 | Seq ID 214 | | PF03945 | Endotoxin N | 100 | 340 |
| | | | PF03944 | Endotoxin C | 532 | 669 |
| APG00526 | Seq ID 215 | Signal peptide | PF03945 | Endotoxin N | 70 | 310 |
| modified | | removed | PF03944 | Endotoxin C | 502 | 639 |
| APG00526 | Seq ID 216 | 3′ Truncation | PF03945 | Endotoxin N | 100 | 340 |
| modified | | | PF03944 | Endotoxin C | 532 | 668 |
| APG00526 | Seq ID 217 | Signal peptide | PF03945 | Endotoxin N | 70 | 310 |
| modified | | removed and 3′ | PF03944 | Endotoxin C | 502 | 638 |
| | | Truncation | | | | |
| APG00717 | Seq ID 218 | | PF03945 | Endotoxin N | 32 | 248 |
| APG00728 | Seq ID 219 | | PF03945 | Endotoxin N | 100 | 340 |
| | | | PF03944 | Endotoxin C | 532 | 669 |
| APG00728 | Seq ID 220 | 3′ Truncation | PF03945 | Endotoxin N | 100 | 340 |
| modified | | | PF03944 | Endotoxin C | 532 | 668 |
| APG00728 | Seq ID 221 | Signal peptide | PF03945 | Endotoxin N | 70 | 310 |
| modified | | removed | PF03944 | Endotoxin C | 502 | 639 |
| APG00728 | Seq ID 222 | Signal peptide | PF03945 | Endotoxin N | 70 | 310 |
| modified | | removed and 3′ | PF03944 | Endotoxin C | 502 | 638 |
| | | Truncation | | | | |
| APG00847 | Seq ID 223 | | PF03318 | ETX MTX2 | 33 | 258 |
| APG00847 | Seq ID 224 | Alternate start | PF03318 | ETX MTX2 | 26 | 251 |
| modified | | | | | | |
| APG00847 | Seq ID 225 | Signal peptide | PF03318 | ETX MTX2 | 13 | 238 |
| modified | | removed | | | | |
| APG00982 | Seq ID 226 | | PF03318 | ETX MTX2 | 56 | 319 |
| APG00982 | Seq ID 227 | Signal peptide | PF03318 | ETX MTX2 | 26 | 290 |
| modified | | removed | | | | |
| APG00006 | Seq ID 228 | Alternate start | PF03318 | ETX MTX2 | 28 | 252 |
| modified | | | | | | |
| APG00036 | Seq ID 229 | Alternate start | PF03318 | ETX MTX2 | 27 | 249 |
| modified | | | | | | |

[0049] Recombinant or synthetic nucleic acids encoding the pesticidal polypeptides disclosed herein are also provided. Of particular interest are nucleic acid sequences that have been designed for expression in a plant of interest. That is, the nucleic acid sequence can be optimized for increased expression in a host plant. A pesticidal protein of the invention can be back-translated to produce a nucleic acid comprising codons optimized for expression in a particular host, for example, a crop plant. In another embodiment, the polynucleotides encoding the polypeptides provided herein may be optimized for increased expression in the transformed plant. That is, the polynucleotides can be synthesized using plant-preferred codons for improved expression. See, for example, Campbell and Gowri (1990) Plant Physiol. 92:1-11 for a discussion of host-preferred codon usage. Methods are available in the art for synthesizing plant-preferred genes. See, for example, U.S. Pat. Nos. 5,380,831, and 5,436,391, and Murray et al. (1989) Nucleic Acids Res. 17:477-498, herein incorporated by reference. Expression of such a coding sequence by the transformed plant (e.g., dicot or monocot) will result in the production of a pesticidal polypeptide and confer increased resistance in the plant to a pest. Recombinant and synthetic nucleic acid molecules encoding the pesticidal proteins of the invention do not include the naturally occurring bacterial sequence encoding the protein.

[0050] A “recombinant polynucleotide” or “recombinant nucleic acid” comprises a combination of two or more chemically linked nucleic acid segments which are not found directly joined in nature. By “directly joined” is intended the two nucleic acid segments are immediately adjacent and joined to one another by a chemical linkage. In specific embodiments, the recombinant polynucleotide comprises a polynucleotide of interest or a variant or fragment thereof such that an additional chemically linked nucleic acid segment is located either 5′, 3′ or internal to the polynucleotide of interest. Alternatively, the chemically-linked nucleic acid segment of the recombinant polynucleotide can be formed by deletion of a sequence. The additional chemically linked nucleic acid segment or the sequence deleted to join the linked nucleic acid segments can be of any length, including for example, 1, 2, 3, 4, 5, 6, 7, 8, 9, 10, 15, 20 or greater nucleotides. Various methods for making such recombinant polynucleotides include chemical synthesis or by the manipulation of isolated segments of polynucleotides by genetic engineering techniques. In specific embodiments, the recombinant polynucleotide can comprise a recombinant DNA sequence or a recombinant RNA sequence. A “fragment of a recombinant polynucleotide or nucleic acid” comprises at least one of a combination of two or more chemically linked amino acid segments which are not found directly joined in nature.

[0051] Fragments of a polynucleotide (RNA or DNA) may encode protein fragments that retain activity. In specific embodiments, a fragment of a recombinant polynucleotide or a recombinant polynucleotide construct comprises at least one junction of the two or more chemically linked or operably linked nucleic acid segments which are not found directly joined in nature. A fragment of a polynucleotide that encodes a biologically active portion of a polypeptide that retains pesticidal activity will encode at least 25, 30, 40, 50, 60, 70, 75, 80, 90, 100, 110, 120, 125, 130, 140, 150, 160, 170, 175, 180, contiguous amino acids, or up to the total number of amino acids present in a full-length polypeptide as set forth in SEQ ID NO: 1, 2, 3, 4, 5, 6, 7, 8, 9, 10, 11, 12, 13, 14, 15, 16, 17, 18, 19, 20, 21, 22, 23, 24, 25, 26, 27, 28, 29, 30, 31, 32, 33, 34, 35, 36, 37, 38, 39, 40, 41, 42, 43, 44, 45, 46, 47, 48, 49, 50, 51, 52, 53, 54, 55, 56, 57, 58, 59, 60, 61, 62, 63, 64, 65, 66, 67, 68, 69, 70, 71, 72, 73, 74, 75, 76, 77, 78, 79, 80, 81, 82, 83, 84, 85, 86, 87, 88, 89, 90, 91, 92, 93, 94, 95, 96, 97, 98, 99, 100, 101, 102, 103, 104, 105, 106, 107, 108, 109, 110, 111, 112, 113, 114, 115, 116, 117, 118, 119, 120, 121, 122, 123, 124, 125, 126, 127, 128, 129, 130, 131, 132, 133, 134, 135, 136, 137, 138, 139, 140, 141, 142, 143, 144, 145, 146, 147, 148, 149, 150, 151, 152, 153, 154, 155, 156, 157, 158, 159, 160, 161, 162, 163, 164, 165, 166, 167, 168, 169, 170, 171, 172, 173, 174, 175, 176, 177, 178, 179, 180, 181, 182, 183, 184, 185, 186, 187, 188, 189, 190, 191, 192, 193, 194, 195, 196, 197, 198, 199, 200, 201, 202, 203, 204, 205, 206, 207, 208, 209, 210, 211, 212, 213, 214, 215, 216, 217, 218, 219, 220, 221, 222, 223, 224, 225, 226, 227, 228, or 229. In specific embodiments, such polypeptide fragments are active fragments, and in still other embodiments, the polypeptide fragment comprises a recombinant polypeptide fragment. As used herein, a fragment of a recombinant polypeptide comprises at least one of a combination of two or more chemically linked amino acid segments which are not found directly joined in nature.

[0052] The term “variants” as used herein is intended to mean substantially similar sequences. For polynucleotides, a variant comprises a deletion and/or addition of one or more nucleotides at one or more internal sites within the native polynucleotide and/or a substitution of one or more nucleotides at one or more sites in the native polynucleotide. As used herein, a “native” polynucleotide or polypeptide comprises a naturally occurring nucleotide sequence or amino acid sequence, respectively.

[0053] Variants of a particular polynucleotide of the invention (i.e., the reference polynucleotide) can also be evaluated by comparison of the percent sequence identity between the polypeptide encoded by a variant polynucleotide and the polypeptide encoded by the reference polynucleotide. Thus, for example, an isolated polynucleotide that encodes a polypeptide with a given percent sequence identity to the polypeptide of SEQ ID NO: 1, 2, 3, 4, 5, 6, 7, 8, 9, 10, 11, 12, 13, 14, 15, 16, 17, 18, 19, 20, 21, 22, 23, 24, 25, 26, 27, 28, 29, 30, 31, 32, 33, 34, 35, 36, 37, 38, 39, 40, 41, 42, 43, 44, 45, 46, 47, 48, 49, 50, 51, 52, 53, 54, 55, 56, 57, 58, 59, 60, 61, 62, 63, 64, 65, 66, 67, 68, 69, 70, 71, 72, 73, 74, 75, 76, 77, 78, 79, 80, 81, 82, 83, 84, 85, 86, 87, 88, 89, 90, 91, 92, 93, 94, 95, 96, 97, 98, 99, 100, 101, 102, 103, 104, 105, 106, 107, 108, 109, 110, 111, 112, 113, 114, 115, 116, 117, 118, 119, 120, 121, 122, 123, 124, 125, 126, 127, 128, 129, 130, 131, 132, 133, 134, 135, 136, 137, 138, 139, 140, 141, 142, 143, 144, 145, 146, 147, 148, 149, 150, 151, 152, 153, 154, 155, 156, 157, 158, 159, 160, 161, 162, 163, 164, 165, 166, 167, 168, 169, 170, 171, 172, 173, 174, 175, 176, 177, 178, 179, 180, 181, 182, 183, 184, 185, 186, 187, 188, 189, 190, 191, 192, 193, 194, 195, 196, 197, 198, 199, 200, 201, 202, 203, 204, 205, 206, 207, 208, 209, 210, 211, 212, 213, 214, 215, 216, 217, 218, 219, 220, 221, 222, 223, 224, 225, 226, 227, 228, or 229 are disclosed. Percent sequence identity between any two polypeptides can be calculated using sequence alignment programs and parameters described elsewhere herein. Where any given pair of polynucleotides of the invention is evaluated by comparison of the percent sequence identity shared by the two polypeptides they encode, the percent sequence identity between the two encoded polypeptides is at least about 40%, 45%, 50%, 55%, 60%, 65%, 70%, 75%, 80%, 81%, 82%, 83%, 84%, 85%, 86%, 87%, 88%, 89%, 90%, 91%, 92%, 93%, 94%, 95%, 96%, 97%, 98%, 99% or more sequence identity to SEQ ID NO: 1, 2, 3, 4, 5, 6, 7, 8, 9, 10, 11, 12, 13, 14, 15, 16, 17, 18, 19, 20, 21, 22, 23, 24, 25, 26, 27, 28, 29, 30, 31, 32, 33, 34, 35, 36, 37, 38, 39, 40, 41, 42, 43, 44, 45, 46, 47, 48, 49, 50, 51, 52, 53, 54, 55, 56, 57, 58, 59, 60, 61, 62, 63, 64, 65, 66, 67, 68, 69, 70, 71, 72, 73, 74, 75, 76, 77, 78, 79, 80, 81, 82, 83, 84, 85, 86, 87, 88, 89, 90, 91, 92, 93, 94, 95, 96, 97, 98, 99, 100, 101, 102, 103, 104, 105, 106, 107, 108, 109, 110, 111, 112, 113, 114, 115, 116, 117, 118, 119, 120, 121, 122, 123, 124, 125, 126, 127, 128, 129, 130, 131, 132, 133, 134, 135, 136, 137, 138, 139, 140, 141, 142, 143, 144, 145, 146, 147, 148, 149, 150, 151, 152, 153, 154, 155, 156, 157, 158, 159, 160, 161, 162, 163, 164, 165, 166, 167, 168, 169, 170, 171, 172, 173, 174, 175, 176, 177, 178, 179, 180, 181, 182, 183, 184, 185, 186, 187, 188, 189, 190, 191, 192, 193, 194, 195, 196, 197, 198, 199, 200, 201, 202, 203, 204, 205, 206, 207, 208, 209, 210, 211, 212, 213, 214, 215, 216, 217, 218, 219, 220, 221, 222, 223, 224, 225, 226, 227, 228, or 229. In other embodiments, the variant of the polynucleotide provided herein differs from the native sequence by at least 1, 2, 3, 4, 5, 6, 7, 8, 9, 10 or more nucleotides.

[0054] Variant polynucleotide and proteins also encompass sequences and proteins derived from a mutagenic and recombinogenic procedure such as DNA shuffling. With such a procedure, one or more different pesticidal protein disclosed herein (SEQ ID NO: 1-209) is manipulated to create a new pesticidal protein possessing the desired properties. In this manner, libraries of recombinant polynucleotides are generated from a population of related sequence polynucleotides comprising sequence regions that have substantial sequence identity and can be homologously recombined in vitro or in vivo. For example, using this approach, sequence motifs encoding a domain of interest may be shuffled between the pesticidal sequences provided herein and other known pesticidal genes to obtain a new gene coding for a protein with an improved property of interest, such as an increased Kₘ in the case of an enzyme. Strategies for such DNA shuffling are known in the art. See, for example, Stemmer (1994) Proc. Natl. Acad. Sci. USA 91:10747-10751; Stemmer (1994) Nature 370:389-391; Crameri et al. (1997) Nature Biotech. 15:436-438; Moore et al. (1997)J. Mol. Biol. 272:336-347; Zhang et al. (1997) Proc. Natl. Acad. Sci. USA 94:4504-4509; Crameri et al. (1998) Nature 391:288-291; and U.S. Pat. Nos. 5,605,793 and 5,837,458. A “shuffled” nucleic acid is a nucleic acid produced by a shuffling procedure such as any shuffling procedure set forth herein. Shuffled nucleic acids are produced by recombining (physically or virtually) two or more nucleic acids (or character strings), for example in an artificial, and optionally recursive, fashion. Generally, one or more screening steps are used in shuffling processes to identify nucleic acids of interest; this screening step can be performed before or after any recombination step. In some (but not all) shuffling embodiments, it is desirable to perform multiple rounds of recombination prior to selection to increase the diversity of the pool to be screened. The overall process of recombination and selection are optionally repeated recursively. Depending on context, shuffling can refer to an overall process of recombination and selection, or, alternately, can simply refer to the recombinational portions of the overall process.

[0055] In one embodiment, a method of obtaining a polynucleotide that encodes an improved polypeptide comprising pesticidal activity is provided, wherein the improved polypeptide has at least one improved property over any one of SEQ ID NOS: 1-229. Such methods can comprise (a) recombining a plurality of parental polynucleotides to produce a library of recombinant polynucleotides encoding recombinant pesticidal polypeptides; (b) screening the library to identify a recombinant polynucleotide that encodes an improved recombinant pesticidal polypeptide that has an enhanced property improved over the parental polynucleotide; (c) recovering the recombinant polynucleotide that encodes the improved recombinant pesticidal polypeptide identified in (b); and, (d) repeating steps (a), (b) and (c) using the recombinant polynucleotide recovered in step (c) as one of the plurality of parental polynucleotides in repeated step (a).

[0056] iii. Sequence Comparisons

[0057] As used herein, the term “identity” or “percent identity” when used with respect to a particular pair of aligned amino acid sequences, refers to the percent amino acid sequence identity that is obtained by counting the number of identical matches in the alignment and dividing such number of identical matches by the length of the aligned sequences. As used herein, the term “similarity” or “percent similarity” when used with respect to a particular pair of aligned amino acid sequences, refers to the sum of the scores that are obtained from a scoring matrix for each amino acid pair in the alignment divided by the length of the aligned sequences.

[0058] Unless otherwise stated, identity and similarity will be calculated by the Needleman-Wunsch global alignment and scoring algorithms (Needleman and Wunsch (1970)J. Mol. Biol. 48(3):443-453) as implemented by the “needle” program, distributed as part of the EMBOSS software package (Rice, P. Longden, I. and Bleasby, A., EMBOSS: The European Molecular Biology Open Software Suite, 2000, Trends in Genetics 16, (6) pp. 276-277, versions 6.3.1 available from EMBnet at embnet.org/resource/emboss and emboss.sourceforge.net, among other sources) using default gap penalties and scoring matrices (EBLOSUM62 for protein and EDNAFULL for DNA). Equivalent programs may also be used. By “equivalent program” is intended any sequence comparison program that, for any two sequences in question, generates an alignment having identical nucleotide residue matches and an identical percent sequence identity when compared to the corresponding alignment generated by needle from EMBOSS version 6.3.1.

[0059] Additional mathematical algorithms are known in the art and can be utilized for the comparison of two sequences. See, for example, the algorithm of Karlin and Altschul (1990) Proc. Natl. Acad. Sci. USA 87:2264, modified as in Karlin and Altschul (1993) Proc. Natl. Acad. Sci. USA 90:5873-5877. Such an algorithm is incorporated into the BLAST programs of Altschul et al. (1990) J. Mol. Biol. 215:403. BLAST nucleotide searches can be performed with the BLASTN program (nucleotide query searched against nucleotide sequences) to obtain nucleotide sequences homologous to pesticidal-like nucleic acid molecules of the invention, or with the BLASTX program (translated nucleotide query searched against protein sequences) to obtain protein sequences homologous to pesticidal nucleic acid molecules of the invention. BLAST protein searches can be performed with the BLASTP program (protein query searched against protein sequences) to obtain amino acid sequences homologous to pesticidal protein molecules of the invention, or with the TBLASTN program (protein query searched against translated nucleotide sequences) to obtain nucleotide sequences homologous to pesticidal protein molecules of the invention. To obtain gapped alignments for comparison purposes, Gapped BLAST (in BLAST 2.0) can be utilized as described in Altschul et al. (1997) Nucleic Acids Res. 25:3389. Alternatively, PSI-Blast can be used to perform an iterated search that detects distant relationships between molecules. See Altschul et al. (1997) supra. When utilizing BLAST, Gapped BLAST, and PSI-Blast programs, the default parameters of the respective programs (e.g., BLASTX and BLASTN) can be used. Alignment may also be performed manually by inspection.

[0060] Two sequences are “optimally aligned” when they are aligned for similarity scoring using a defined amino acid substitution matrix (e.g., BLOSUM62), gap existence penalty and gap extension penalty so as to arrive at the highest score possible for that pair of sequences. Amino acid substitution matrices and their use in quantifying the similarity between two sequences are well-known in the art and described, e.g., in Dayhoff et al. (1978) “A model of evolutionary change in proteins.” In “Atlas of Protein Sequence and Structure,” Vol. 5, Suppl. 3 (ed. M. O. Dayhoff), pp. 345-352. Natl. Biomed. Res. Found, Washington, D.C. and Henikoff et al. (1992) Proc. Natl. Acad. Sci. USA 89:10915-10919. The BLOSUM62 matrix is often used as a default scoring substitution matrix in sequence alignment protocols. The gap existence penalty is imposed for the introduction of a single amino acid gap in one of the aligned sequences, and the gap extension penalty is imposed for each additional empty amino acid position inserted into an already opened gap. The alignment is defined by the amino acids positions of each sequence at which the alignment begins and ends, and optionally by the insertion of a gap or multiple gaps in one or both sequences, so as to arrive at the highest possible score. While optimal alignment and scoring can be accomplished manually, the process is facilitated by the use of a computer-implemented alignment algorithm, e.g., gapped BLAST 2.0, described in Altschul et al. (1997) Nucleic Acids Res. 25:3389-3402, and made available to the public at the National Center for Biotechnology Information Web site (www.ncbi.nlm.nih.gov). Optimal alignments, including multiple alignments, can be prepared using, e.g., PSI-BLAST, available through www.ncbi.nlm.nih.gov and described by Altschul et al. (1997) Nucleic Acids Res. 25:3389-3402.

[0061] With respect to an amino acid sequence that is optimally aligned with a reference sequence, an amino acid residue “corresponds to” the position in the reference sequence with which the residue is paired in the alignment. The “position” is denoted by a number that sequentially identifies each amino acid in the reference sequence based on its position relative to the N-terminus. For example, in SEQ ID NO: 1 position 1 is L, position 2 is S, position 3 is F, etc. When a test sequence is optimally aligned with SEQ ID NO: 1, a residue in the test sequence that aligns with the F at position 3 is said to “correspond to position 3” of SEQ ID NO: 1. Owing to deletions, insertion, truncations, fusions, etc., that must be taken into account when determining an optimal alignment, in general the amino acid residue number in a test sequence as determined by simply counting from the N-terminal will not necessarily be the same as the number of its corresponding position in the reference sequence. For example, in a case where there is a deletion in an aligned test sequence, there will be no amino acid that corresponds to a position in the reference sequence at the site of deletion. Where there is an insertion in an aligned reference sequence, that insertion will not correspond to any amino acid position in the reference sequence. In the case of truncations or fusions there can be stretches of amino acids in either the reference or aligned sequence that do not correspond to any amino acid in the corresponding sequence.

[0062] iv. Antibodies

[0063] Antibodies to the polypeptides of the present invention, or to variants or fragments thereof, are also encompassed. Methods for producing antibodies are well known in the art (see, for example, Harlow and Lane (1988) Antibodies: A Laboratory Manual, Cold Spring Harbor Laboratory, Cold Spring Harbor, N.Y.; and U.S. Pat. No. 4,196,265). These antibodies can be used in kits for the detection and isolation of toxin polypeptides. Thus, this disclosure provides kits comprising antibodies that specifically bind to the polypeptides described herein, including, for example, polypeptides having the sequence of SEQ ID NOs: 1, 2, 3, 4, 5, 6, 7, 8, 9, 10, 11, 12, 13, 14, 15, 16, 17, 18, 19, 20, 21, 22, 23, 24, 25, 26, 27, 28, 29, 30, 31, 32, 33, 34, 35, 36, 37, 38, 39, 40, 41, 42, 43, 44, 45, 46, 47, 48, 49, 50, 51, 52, 53, 54, 55, 56, 57, 58, 59, 60, 61, 62, 63, 64, 65, 66, 67, 68, 69, 70, 71, 72, 73, 74, 75, 76, 77, 78, 79, 80, 81, 82, 83, 84, 85, 86, 87, 88, 89, 90, 91, 92, 93, 94, 95, 96, 97, 98, 99, 100, 101, 102, 103, 104, 105, 106, 107, 108, 109, 110, 111, 112, 113, 114, 115, 116, 117, 118, 119, 120, 121, 122, 123, 124, 125, 126, 127, 128, 129, 130, 131, 132, 133, 134, 135, 136, 137, 138, 139, 140, 141, 142, 143, 144, 145, 146, 147, 148, 149, 150, 151, 152, 153, 154, 155, 156, 157, 158, 159, 160, 161, 162, 163, 164, 165, 166, 167, 168, 169, 170, 171, 172, 173, 174, 175, 176, 177, 178, 179, 180, 181, 182, 183, 184, 185, 186, 187, 188, 189, 190, 191, 192, 193, 194, 195, 196, 197, 198, 199, 200, 201, 202, 203, 204, 205, 206, 207, 208, 209, 210, 211, 212, 213, 214, 215, 216, 217, 218, 219, 220, 221, 222, 223, 224, 225, 226, 227, 228, or 229.

### II. Pests

[0064] The compositions and methods provided herein are useful against a variety of pests. “Pests” includes but is not limited to, insects, fungi, bacteria, nematodes, acarids, protozoan pathogens, animal-parasitic liver flukes, and the like. Pests of particular interest are insect pests, particularly insect pests that cause significant damage to agricultural plants. Insect pests include insects selected from the orders Coleoptera, Diptera, Hymenoptera, Lepidoptera, Mallophaga, Homoptera, Hemiptera, Orthroptera, Thysanoptera, Dermaptera, Isoptera, Anoplura, Siphonaptera, Trichoptera, or nematodes. In non-limiting embodiments, the insect pest comprises Western corn rootworm, Diabrotica virgifera virgifera; Fall armyworm, Spodoptera frupperda; Colorado potato beetle, Leptinotarsa decemlineata; Corn earworm, Helicoverpa zea (in North America same species attacks cotton and called cotton bollworm); European corn borer, Ostrinia nubilalis; Black cutworm, Agrotis ipsilon; Diamondback moth, Plutella xylostella; Velvetbean caterpillar, Anticarsia gemmatalis; Southwestern corn borer, Diatraea grandiosella; Cotton bollworm, Helicoverpa armigera (found other than USA in rest of the world); Southern green stinkbug, Nezara viridula; Green stinkbug, Chinavia halaris; Brown marmorated stinkbug, Halyomorpha halys; and Brown stinbug, Euschistus servus Euschistus heros (Neotropical brown stink bug OR soy stink bug); Piezodorus guildinii (red-banded stink bug); Dichelops melacanthus (no common name) and/or Dichelops furcatus (no common name); an aphid, such as a soybean aphid. In other embodiments, the pest comprises a nematode including, but not limited to, Meloidogyne hapla (Northern root-knot nematode); Meloidogyne enterolobii, Meloidogyne arenaria (peanut root-knot nematode); and Meloidogyne javanica.

[0065] The term “insect pests” as used herein refers to insects and other similar pests such as, for example, those of the order Acari including, but not limited to, mites and ticks. Insect pests of the present invention include, but are not limited to, insects of the order Lepidoptera, e.g. Achoroia grisella, Acleris gloverana, Acleris variana, Adoxophyes orana, Agrotis ipsilon, Alabama argillacea, Alsophila pometaria, Amyelois transitella, Anagasta kuehniella, Anarsia lineatella, Anisota senatoria, Antheraea pernyi, Anticarsia gemmatalis, Archips sp., Argyrotaenia sp., Athetis mindara, Bombyx mori, Bucculatrix thurberiella, Cadra cautella, Choristoneura sp., Cochylls hospes, Colias eurytheme, Corcyra cephalonica, Cydia latiferreanus, Cydia pomonella, Datana integerrima, Dendrolimus sibericus, Desmiafeneralis, Diaphania hyalinata, Diaphania nitidalis, Diatraea grandiosella, Diatraea saccharalis, Ennomos subsignaria, Eoreuma loftini, Esphestia elutella, Erannis tilaria, Estigmene acrea, Eulia salubricola, Eupocoellia ambiguella, Eupoecilia ambiguella, Euproctis chrysorrhoea, Euxoa messoria, Galleria mellonella, Grapholita molesta, Harrisina americana, Helicoverpa subflexa, Helicoverpa zea, Heliothis virescens, Hemileuca oliviae, Homoeosoma electellum, Hyphantia cunea, Keiferia lycopersicella, Lambdina fiscellaria fiscellaria, Lambdina fiscellaria lugubrosa, Leucoma salicis, Lobesia botrana, Loxostege sticticalis, Lymantria dispar, Macalla thyrisalis, Malacosoma sp., Mamestra brassicae, Mamestra configurata, Manduca quinquemaculata, Manduca sexta, Maruca testulalis, Melanchra picta, Operophtera brumata, Orgyia sp., Ostrinia nubilalis, Paleacrita vernata, Papilio cresphontes, Pectinophora gossypiella, Phryganidia californica, Phyllonorycter blancardella, Pieris napi, Pieris rapae, Plathypena scabra, Platynota flouendana, Platynota stultana, Platyptilia carduidactyla, Plodia interpunctella, Plutella xylostella, Pontia protodice, Pseudaletia unipuncta, Pseudoplasia includens, Sabulodes aegrotata, Schizura concinna, Sitotroga cerealella, Spilonta ocellana, Spodoptera sp., Thaurnstopoea pityocampa, Tinsola bisselliella, Trichoplusia hi, Udea rubigalis, Xylomyges curiails, and Yponomeuta padella.

[0066] Insect pests also include insects selected from the orders Diptera, Hymenoptera, Lepidoptera, Mallophaga, Homoptera, Hemiptera, Orthroptera, Thysanoptera, Dermaptera, Isoptera, Anoplura, Siphonaptera, Trichoptera, Coleoptera.

[0067] Insect pests of the invention for the major crops include, but are not limited to: Maize: Ostrinia nubilalis, European corn borer; Agrotis ipsilon, black cutworm; Helicoverpa zeae, corn earworm; Spodoptera frugiperda, fall armyworm; Diatraea grandiosella, southwestern corn borer; Elasmopalpus lignosellus, lesser cornstalk borer; Diatraea saccharalis, surgarcane borer; western corn rootworm, e.g., Diabrotica virgifera virgifera; northern corn rootworm, e.g., Diabrotica longicornis barberi; southern corn rootworm, e.g., Diabrotica undecimpunctata howardi; Melanotus spp., wireworms; Cyclocephala borealis, northern masked chafer (white grub); Cyclocephala immaculata, southern masked chafer (white grub); Popillia japonica, Japanese beetle; Chaetocnema pulicaria, corn flea beetle; Sphenophorus maidis, maize billbug; Rhopalosiphum maidis, corn leaf aphid; Anuraphis maidiradicis, corn root aphid; Euschistus heros (Neotropical brown stink bug OR soy stink bug); Piezodorus guildinii (red-banded stink bug); Dichelops melacanthus (no common name); Dichelops furcatus (no common name); Blissus leucopterus leucopterus, chinch bug; Melanoplus femurrubrum, redlegged grasshopper; Melanoplus sanguinipes, migratory grasshopper; Hylemya platura, seedcorn maggot; Agromyza parvicornis, corn blotch leafminer; Anaphothrips obscrurus, grass thrips; Solenopsis milesta, thief ant; Tetranychus urticae, two spotted spider mite; Sorghum: Chilo partellus, sorghum borer; Spodoptera frugiperda, fall armyworm; Helicoverpa zea, corn earworm; Elasmopalpus lignosellus, leser cornstalk borer; Feltia subterranea, granulate cutworm; Phyllophaga crinita, white grub; Eleodes, Conoderus, and Aeolus spp., wireworms; Oulema melanopus, cereal leaf beetle; Chaetocnema pulicaria, corn flea beetle; Sphenophorus maidis, maize billbug; Rhopalosiphum maidis; corn leaf aphid; Sipha flava, yellow sugarcane aphid; chinch bug, e.g., Blissus leucopterus leucopterus; Contarinia sorghicola, sorghum midge; Tetranychus cinnabarinus, carmine spider mite; Tetranychus urticae, two-spotted spider mite; Wheat: Pseudaletia unipunctata, army worm; Spodoptera frugiperda, fall armyworm; Elasmopalpus lignosellus, lesser cornstalk borer; Agrotis orthogonia, pale western cutworm; Elasmopalpus lignosellus, lesser cornstalk borer; Oulema melanopus, cereal leaf beetle; Hypera punctata, clover leaf weevil; southern corn rootworm, e.g., Diabrotica undecimpunctata howardi; Russian wheat aphid; Schizaphis graminum, greenbug; Macrosiphum avenae, English grain aphid; Melanoplus femurrubrum, redlegged grasshopper; Melanoplus differentialis, differential grasshopper; Melanoplus sanguinipes, migratory grasshopper; Mayetiola destructor, Hessian fly; Sitodiplosis mosellana, wheat midge; Meromyza americana, wheat stem maggot; Hylemya coarctata, wheat bulb fly; Frankliniella fusca, tobacco thrips; Cephus cinctus, wheat stem sawfly; Aceria tulipae, wheat curl mite; Sunflower: Cylindrocupturus adspersus, sunflower stem weevil; Smicronyx fulus, red sunflower seed weevil; Smicronyx sordidus, gray sunflower seed weevil; Suleima helianthana, sunflower bud moth; Homoeosoma electellum, sunflower moth; Zygogramma exclamationis, sunflower beetle; Bothyrus gibbosus, carrot beetle; Neolasioptera murtfeldtiana, sunflower seed midge; Cotton: Heliothis virescens, tobacco budworm; Helicoverpa zea, cotton bollworm; Spodoptera exigua, beet armyworm; Pectinophora gossypiella, pink bollworm; boll weevil, e.g., Anthonomus grandis; Aphis gossypii, cotton aphid; Pseudatomoscelis seriatus, cotton fleahopper; Trialeurodes abutilonea, bandedwinged whitefly; Lygus lineolaris, tarnished plant bug; Melanoplus femurrubrum, redlegged grasshopper; Melanoplus differentialis, differential grasshopper; Thrips tabaci, onion thrips; Franklinkiella fusca, tobacco thrips; Tetranychus cinnabarinus, carmine spider mite; Tetranychus urticae, two-spotted spider mite; Rice: Diatraea saccharalis, sugarcane borer; Spodoptera frupperda, fall armyworm; Helicoverpa zea, corn earworm; Colaspis brunnea, grape colaspis; Lissorhoptrus oryzophilus, rice water weevil; Sitophilus oryzae, rice weevil; Nephotettix nigropictus, rice leafhoper; chinch bug, e.g., Blissus leucopterus leucopterus; Acrosternum hilare, green stink bug; Soybean: Pseudoplusia includens, soybean looper; Anticarsia gemmatalis, velvetbean caterpillar; Plathypena scabra, green cloverworm; Ostrinia nubilalis, European corn borer; Agrotis ipsilon, black cutworm; Spodoptera exigua, beet armyworm; Heliothis virescens, tobacco budworm; Helicoverpa zea, cotton bollworm; Epilachna varivestis, Mexican bean beetle; Myzus persicae, green peach aphid; Empoasca fabae, potato leafhopper; Acrosternum hilare, green stink bug; Melanoplus femurrubrum, redlegged grasshopper; Melanoplus differentialis, differential grasshopper; Hylemya platura, seedcorn maggot; Sericothrips variabilis, soybean thrips; Thrips tabaci, onion thrips; Tetranychus turkestani, strawberry spider mite; Tetranychus urticae, two-spotted spider mite; Barley: Ostrinia nubilalis, European corn borer; Agrotis ipsilon, black cutworm; Schizaphis graminum, greenbug; chinch bug, e.g., Blissus leucopterus leucopterus; Acrosternum hilare, green stink bug; Euschistus servus, brown stink bug; Jylemya platura, seedcorn maggot; Mayetiola destructor, Hessian fly; Petrobia latens, brown wheat mite; Oil Seed Rape: Vrevicoryne brassicae, cabbage aphid; Phyllotreta cruciferae, crucifer flea beetle; Phyllotreta striolata, striped flea beetle; Phyllotreta nemorum, striped turnip flea beetle; Meligethes aeneus, rapeseed beetle; and the pollen beetles Meligethes rufimanus, Meligethes nigrescens, Meligethes canadianus, and Meligethes viridescens; Potato: Leptinotarsa decemlineata, Colorado potato beetle.

[0068] The methods and compositions provided herein may be effective against Hemiptera such as Lygus hesperus, Lygus lineolaris, Lygus pratensis, Lygus ruguhpennis Popp, Lygus pabulinus, Calocoris norvegicus, Orthops compestris, Plesiocoris rugicollis, Cyrtopeltis modestus, Cyrtopeltis notatus, Spanagonicus albofasciatus, Diaphnocoris chlorinonis, Labopidicola aitii, Pseudatomoscelis seriatus, Adelphocoris rapidus, Poecilocapsus lineatus, Blissus leucopterus, Nysius ericae, Nysius raphanus, Euschistus servus, Nezara viridula, Eurygaster, Coreidae, Pyrrhocoridae, Tinidae, Blostomatidae, Reduviidae, and Cimicidae. Pests of interest also include Araecerus fasciculatus, coffee bean weevil; Acanthoscelides obtectus, bean weevil; Bruchus rufmanus, broadbean weevil; Bruchus pisorum, pea weevil; Zabrotes subfasciatus, Mexican bean weevil; Diabrotica balteata, banded cucumber beetle; Cerotoma trifurcata, bean leaf beetle; Diabrotica virgifera, Mexican corn rootworm; Epitrix cucumeris, potato flea beetle; Chaetocnema confinis, sweet potato flea beetle; Hypera postica, alfalfa weevil; Anthonomus quadrigibbus, apple curculio; Sternechus paludatus, bean stalk weevil; Hypera brunnipennis, Egyptian alfalfa weevil; Sitophilus granaries, granary weevil; Craponius inaequalis, grape curculio; Sitophilus zeamais, maize weevil; Conotrachelus nenuphar, plum curculio; Euscepes postfaciatus, West Indian sweet potato weevil; Maladera castanea, Asiatic garden beetle; Rhizotrogus majalis, European chafer; Macrodactylus subspinosus, rose chafer; Tribolium confusum, confused flour beetle; Tenebrio obscurus, dark mealworm; Tribolium castaneum, red flour beetle; Tenebrio molitor, yellow mealworm.

[0069] Nematodes include parasitic nematodes such as root-knot, cyst, and lesion nematodes, including Heterodera spp., Meloidogyne spp., and Globodera spp.; particularly members of the cyst nematodes, including, but not limited to, Heterodera glycines (soybean cyst nematode); Heterodera schachtii (beet cyst nematode); Heterodera avenae (cereal cyst nematode); and Globodera rostochiensis and Globodera pailida (potato cyst nematodes). Lesion nematodes include Pratylenchus spp.

[0070] Insect pests may be tested for pesticidal activity of compositions of the invention in early developmental stages, e.g., as larvae or other immature forms. The insects may be reared in total darkness at from about 20° C. to about 30° C. and from about 30% to about 70% relative humidity. Bioassays may be performed as described in Czapla and Lang (1990) J. Econ. Entomol. 83 (6): 2480-2485. See, also the experimental section herein.

### III. Expression Cassettes

[0071] Polynucleotides encoding the pesticidal proteins provided herein can be provided in expression cassettes for expression in an organism of interest. The cassette will include 5′ and 3′ regulatory sequences operably linked to a polynucleotide encoding a pesticidal polypeptide provided herein that allows for expression of the polynucleotide. The cassette may additionally contain at least one additional gene or genetic element to be cotransformed into the organism. Where additional genes or elements are included, the components are operably linked. Alternatively, the additional gene(s) or element(s) can be provided on multiple expression cassettes. Such an expression cassette is provided with a plurality of restriction sites and/or recombination sites for insertion of the polynucleotides to be under the transcriptional regulation of the regulatory regions. The expression cassette may additionally contain a selectable marker gene.

[0072] The expression cassette will include in the 5′-3′ direction of transcription, a transcriptional and translational initiation region (i.e., a promoter), a pesticidal polynucleotide of the invention, and a transcriptional and translational termination region (i.e., termination region) functional in the organism of interest, i.e., a plant or bacteria. The promoters of the invention are capable of directing or driving expression of a coding sequence in a host cell. The regulatory regions (i.e., promoters, transcriptional regulatory regions, and translational termination regions) may be endogenous or heterologous to the host cell or to each other. As used herein, “heterologous” in reference to a sequence is a sequence that originates from a foreign species, or, if from the same species, is substantially modified from its native form in composition and/or genomic locus by deliberate human intervention. As used herein, a chimeric gene comprises a coding sequence operably linked to a transcription initiation region that is heterologous to the coding sequence.

[0073] Convenient termination regions are available from the Ti-plasmid of A. tumefaciens, such as the octopine synthase and nopaline synthase termination regions. See also Guerineau et al. (1991)Mol. Gen. Genet. 262:141-144; Proudfoot (1991) Cell 64:671-674; Sanfacon et al. (1991) Genes Dev. 5:141-149; Mogen et al. (1990) Plant Cell 2:1261-1272; Munroe et al. (1990) Gene 91:151-158; Ballas et al. (1989) Nucleic Acids Res. 17:7891-7903; and Joshi et al. (1987) Nucleic Acids Res. 15:9627-9639.

[0074] Additional regulatory signals include, but are not limited to, transcriptional initiation start sites, operators, activators, enhancers, other regulatory elements, ribosomal binding sites, an initiation codon, termination signals, and the like. See, for example, U.S. Pat. Nos. 5,039,523 and 4,853,331; EPO 0480762A2; Sambrook et al. (1992) Molecular Cloning: A Laboratory Manual, ed. Maniatis et al. (Cold Spring Harbor Laboratory Press, Cold Spring Harbor, N.Y.), hereinafter “Sambrook 11”; Davis et al., eds. (1980) Advanced Bacterial Genetics (Cold Spring Harbor Laboratory Press), Cold Spring Harbor, N.Y., and the references cited therein.

[0075] In preparing the expression cassette, the various DNA fragments may be manipulated, so as to provide for the DNA sequences in the proper orientation and, as appropriate, in the proper reading frame. Toward this end, adapters or linkers may be employed to join the DNA fragments or other manipulations may be involved to provide for convenient restriction sites, removal of superfluous DNA, removal of restriction sites, or the like. For this purpose, in vitro mutagenesis, primer repair, restriction, annealing, resubstitutions, e.g., transitions and transversions, may be involved.

[0076] A number of promoters can be used in the practice of the invention. The promoters can be selected based on the desired outcome. The nucleic acids can be combined with constitutive, inducible, tissue-preferred, or other promoters for expression in the organism of interest. See, for example, promoters set forth in WO 99/43838 and in U.S. Pat. Nos. 8,575,425; 7,790,846; 8,147,856; 8,586832; 7,772,369; 7,534,939; 6,072,050; 5,659,026; 5,608,149; 5,608,144; 5,604,121; 5,569,597; 5,466,785; 5,399,680; 5,268,463; 5,608,142; and 6,177,611; herein incorporated by reference.

[0077] For expression in plants, constitutive promoters also include CaMV 35S promoter (Odell et al. (1985) Nature 313:810-812); rice actin (McElroy et al. (1990) Plant Cell 2:163-171); ubiquitin (Christensen et al. (1989) Plant Mol. Biol. 12:619-632 and Christensen et al. (1992) Plant Mol. Biol. 18:675-689); pEMU (Last et al. (1991) Theor. Appl. Genet. 81:581-588); MAS (Velten et al. (1984) EMBO J. 3:2723-2730). Inducible promoters include those that drive expression of pathogenesis-related proteins (PR proteins), which are induced following infection by a pathogen. See, for example, Redolfi et al. (1983) Neth. J. Plant Pathol. 89:245-254; Uknes et al. (1992) Plant Cell 4:645-656; and Van Loon (1985) Plant Mol. Virol. 4:111-116; and WO 99/43819, herein incorporated by reference. Promoters that are expressed locally at or near the site of pathogen infection may also be used (Marineau et al. (1987) Plant Mol. Biol. 9:335-342; Matton et al. (1989) Molecular Plant-Microbe Interactions 2:325-331; Somsisch et al. (1986) Proc. Natl. Acad. Sci. USA 83:2427-2430; Somsisch et al. (1988) Mol. Gen. Genet. 2:93-98; and Yang (1996) Proc. Natl. Acad. Sci. USA 93:14972-14977; Chen et al. (1996) Plant J. 10:955-966; Zhang et al. (1994) Proc. Natl. Acad. Sci. USA 91:2507-2511; Warner et al. (1993) Plant J. 3:191-201; Siebertz et al. (1989) Plant Cell 1:961-968; Cordero et al. (1992) Physiol. Mol. Plant Path. 41:189-200; U.S. Pat. No. 5,750,386 (nematode-inducible); and the references cited therein).

[0078] Wound-inducible promoters may be used in the constructions of the invention. Such wound-inducible promoters include pin II promoter (Ryan (1990) Ann. Rev. Phytopath. 28:425-449; Duan et al. (1996) Nature Biotechnology 14:494-498); wun1 and wun2 (U.S. Pat. No. 5,428,148); win1 and win2 (Stanford et al. (1989) Mol. Gen. Genet. 215:200-208); systemin (McGurl et al. (1992) Science 225:1570-1573); WIP1 (Rohmeier et al. (1993) Plant Mol. Biol. 22:783-792; Eckelkamp et al. (1993) FEBS Letters 323:73-76); MPI gene (Corderok et al. (1994) Plant 6(2):141-150); and the like, herein incorporated by reference.

[0079] Tissue-preferred promoters for use in the invention include those set forth in Yamamoto et al. (1997) Plant J. 12(2):255-265; Kawamata et al. (1997) Plant Cell Physiol. 38(7):792-803; Hansen et al. (1997) Mol. Gen Genet. 254(3):337-343; Russell et al. (1997) Transgenic Res. 6(2):157-168; Rinehart et al. (1996) Plant Physiol. 112(3):1331-1341; Van Camp et al. (1996) Plant Physiol. 112(2):525-535; Canevascini et al. (1996) Plant Physiol. 112(2):513-524; Yamamoto et al. (1994) Plant Cell Physiol. 35(5):773-778; Lam (1994) Results Probl. Cell Differ. 20:181-196; Orozco et al. (1993) Plant Mol Biol. 23(6):1129-1138; Matsuoka et al. (1993) Proc Natl. Acad. Sci. USA 90(20):9586-9590; and Guevara-Garcia et al. (1993) Plant J. 4(3):495-505.

[0080] Leaf-preferred promoters include those set forth in Yamamoto et al. (1997) Plant J. 12(2):255-265; Kwon et al. (1994) Plant Physiol. 105:357-67; Yamamoto et al. (1994) Plant Cell Physiol. 35(5):773-778; Gotor et al. (1993) Plant 3:509-18; Orozco et al. (1993) Plant Mol. Biol. 23 (6): 1129-1138; and Matsuoka et al. (1993) Proc. Natl. Acad. Sci. USA 90(20):9586-9590.

[0081] Root-preferred promoters are known and include those in Hire et al. (1992) Plant Mol. Biol. 20(2):207-218 (soybean root-specific glutamine synthetase gene); Keller and Baumgartner (1991) Plant Cell 3(10):1051-1061 (root-specific control element); Sanger et al. (1990) Plant Mol. Biol. 14(3):433-443 (mannopine synthase (MAS) gene of Agrobacterium tumefaciens); and Miao et al. (1991) Plant Cell 3(1):11-22 (cytosolic glutamine synthetase (GS)); Bogusz et al. (1990) Plant Cell 2(7):633-641; Leach and Aoyagi (1991) Plant Science (Limerick) 79(1):69-76 (rolC and rolD); Teeri et al. (1989) EMBO J. 8(2):343-350; Kuster et al. (1995) Plant Mol. Biol. 29(4):759-772 (the VfENOD-GRP3 gene promoter); and, Capana et al. (1994) Plant Mol. Biol. 25(4):681-691 (rolB promoter). See also U.S. Pat. Nos. 5,837,876; 5,750,386; 5,633,363; 5,459,252; 5,401,836; 5,110,732; and 5,023,179.

[0082] “Seed-preferred” promoters include both “seed-specific” promoters (those promoters active during seed development such as promoters of seed storage proteins) as well as “seed-germinating” promoters (those promoters active during seed germination). See Thompson et al. (1989) BioEssays 10:108. Seed-preferred promoters include, but are not limited to, Cim1 (cytokinin-induced message); cZ19B1 (maize 19 kDa zein); milps (myo-inositol-1-phosphate synthase) (see WO 00/11177 and U.S. Pat. No. 6,225,529). Gamma-zein is an endosperm-specific promoter. Globulin 1 (Glb-1) is a representative embryo-specific promoter. For dicots, seed-specific promoters include, but are not limited to, bean β-phaseolin, napin, β-conglycinin, soybean lectin, cruciferin, and the like. For monocots, seed-specific promoters include, but are not limited to, maize 15 kDa zein, 22 kDa zein, 27 kDa zein, gamma-zein, waxy, shrunken 1, shrunken 2, Globulin 1, etc. See also WO 00/12733, where seed-preferred promoters from end1 and end2 genes are disclosed.

[0083] For expression in a bacterial host, promoters that function in bacteria are well-known in the art. Such promoters include any of the known crystal protein gene promoters, including the promoters of any of the pesticidal proteins of the invention, and promoters specific for B. thuringiensis sigma factors. Alternatively, mutagenized or recombinant crystal protein-encoding gene promoters may be recombinantly engineered and used to promote expression of the novel gene segments disclosed herein.

[0084] The expression cassette can also comprise a selectable marker gene for the selection of transformed cells. Selectable marker genes are utilized for the selection of transformed cells or tissues. Marker genes include genes encoding antibiotic resistance, such as those encoding neomycin phosphotransferase II (NEO) and hygromycin phosphotransferase (HPT), as well as genes conferring resistance to herbicidal compounds, such as glufosinate ammonium, bromoxynil, imidazolinones, and 2,4-dichlorophenoxyacetate (2,4-D). Additional selectable markers are known and any can be used in the practice of the invention. See, for example, PCT/US2015/066648, filed on Dec. 18, 2015, herein incorporated by reference in its entirety, which discloses glufosinate resistance sequences that can be employed as selectable markers.

### IV. Methods, Host Cells and Plant Cells

[0085] As indicated, DNA constructs comprising nucleotide sequences encoding the pesticidal proteins or active variants or fragment thereof can be used to transform plants of interest or other organisms of interest. Methods for transformation involve introducing a nucleotide construct into a plant. By “introducing” is intended to introduce the nucleotide construct to the plant or other host cell in such a manner that the construct gains access to the interior of a cell of the plant or host cell. The methods of the invention do not require a particular method for introducing a nucleotide construct to a plant or host cell, only that the nucleotide construct gains access to the interior of at least one cell of the plant or the host organism. Methods for introducing nucleotide constructs into plants and other host cells are known in the art including, but not limited to, stable transformation methods, transient transformation methods, and virus-mediated methods.

[0086] The methods result in a transformed organisms, such as a plant, including whole plants, as well as plant organs (e.g., leaves, stems, roots, etc.), seeds, plant cells, propagules, embryos and progeny of the same. Plant cells can be differentiated or undifferentiated (e.g. callus, suspension culture cells, protoplasts, leaf cells, root cells, phloem cells, pollen).

[0087] “Transgenic plants” or “transformed plants” or “stably transformed” plants or cells or tissues refers to plants that have incorporated or integrated a polynucleotide encoding at least one pesticidal polypeptide of the invention. It is recognized that other exogenous or endogenous nucleic acid sequences or DNA fragments may also be incorporated into the plant cell. Agrobacterium- and biolistic-mediated transformation remain the two predominantly employed approaches. However, transformation may be performed by infection, transfection, microinjection, electroporation, microprojection, biolistics or particle bombardment, electroporation, silica/carbon fibers, ultrasound mediated, PEG mediated, calcium phosphate co-precipitation, polycation DMSO technique, DEAE dextran procedure, Agro and viral mediated (Caulimoriviruses, Geminiviruses, RNA plant viruses), liposome mediated and the like.

[0088] Transformation protocols as well as protocols for introducing polypeptides or polynucleotide sequences into plants may vary depending on the type of plant or plant cell, i.e., monocot or dicot, targeted for transformation. Methods for transformation are known in the art and include those set forth in U.S. Pat. Nos. 8,575,425; 7,692,068; 8,802,934; 7,541,517; each of which is herein incorporated by reference. See, also, Rakoczy-Trojanowska, M. (2002) Cell Mol Biol Lett. 7:849-858; Jones et al. (2005) Plant Methods 1:5; Rivera et al. (2012) Physics of Life Reviews 9:308-345; Bartlett et al. (2008) Plant Methods 4:1-12; Bates, G. W. (1999) Methods in Molecular Biology 111:359-366; Binns and Thomashow (1988) Annual Reviews in Microbiology 42:575-606; Christou, P. (1992) The Plant Journal 2:275-281; Christou, P. (1995) Euphytica 85:13-27; Tzfira et al. (2004) TRENDS in Genetics 20:375-383; Yao et al. (2006) Journal of Experimental Botany 57:3737-3746; Zupan and Zambryski (1995) Plant Physiology 107:1041-1047; Jones et al. (2005) Plant Methods 1:5;

[0089] Transformation may result in stable or transient incorporation of the nucleic acid into the cell. “Stable transformation” is intended to mean that the nucleotide construct introduced into a host cell integrates into the genome of the host cell and is capable of being inherited by the progeny thereof “Transient transformation” is intended to mean that a polynucleotide is introduced into the host cell and does not integrate into the genome of the host cell.

[0090] Methods for transformation of chloroplasts are known in the art. See, for example, Svab et al. (1990) Proc. Nail. Acad. Sci. USA 87:8526-8530; Svab and Maliga (1993) Proc. Natl. Acad. Sci. USA 90:913-917; Svab and Maliga (1993) EMBO J. 12:601-606. The method relies on particle gun delivery of DNA containing a selectable marker and targeting of the DNA to the plastid genome through homologous recombination. Additionally, plastid transformation can be accomplished by transactivation of a silent plastid-borne transgene by tissue-preferred expression of a nuclear-encoded and plastid-directed RNA polymerase. Such a system has been reported in McBride et al. (1994) Proc. Natl. Acad. Sci. USA 91:7301-7305.

[0091] The cells that have been transformed may be grown into plants in accordance with conventional ways. See, for example, McCormick et al. (1986) Plant Cell Reports 5:81-84. These plants may then be grown, and either pollinated with the same transformed strain or different strains, and the resulting hybrid having constitutive expression of the desired phenotypic characteristic identified. Two or more generations may be grown to ensure that expression of the desired phenotypic characteristic is stably maintained and inherited and then seeds harvested to ensure expression of the desired phenotypic characteristic has been achieved. In this manner, the present invention provides transformed seed (also referred to as “transgenic seed”) having a nucleotide construct of the invention, for example, an expression cassette of the invention, stably incorporated into their genome.

[0092] In specific embodiments, the sequences provided herein can be targeted to specific sites within the genome of the host cell or plant cell. Such methods include, but are not limited to, meganucleases designed against the plant genomic sequence of interest (D'Halluin et al. 2013 Plant Biotechnol J); CRISPR-Cas9, TALENs, and other technologies for precise editing of genomes (Feng, et al. Cell Research 23:1229-1232, 2013, Podevin, et al. Trends Biotechnology, online publication, 2013, Wei et al., J Gen Genomics, 2013, Zhang et at (2013) WO 2013/026740); Cre-lox site-specific recombination (Dale et al. (1995) Plant J 7:649-659; Lyznik, et al. (2007) Transgenic Plant J 1:1-9; FLP-FRT recombination (Li et al. (2009) Plant Physiol 151:1087-1095); Bxb 1-mediated integration (Yau et al. Plant J (2011) 701:147-166); zinc-finger mediated integration (Wright et al. (2005) Plant J 44:693-705); Cai et al. (2009) Plant Mol Biol 69:699-709); and homologous recombination (Lieberman-Lazarovich and Levy (2011) Methods Mol Biol 701: 51-65); Puchta (2002) Plant Mol Biol 48:173-182).

[0093] The sequence provided herein may be used for transformation of any plant species, including, but not limited to, monocots and dicots. Examples of plants of interest include, but are not limited to, corn (maize), sorghum, wheat, sunflower, tomato, crucifers, peppers, potato, cotton, rice, soybean, sugarbeet, sugarcane, tobacco, barley, and oilseed rape, Brassica sp., alfalfa, rye, millet, safflower, peanuts, sweet potato, cassaya, coffee, coconut, pineapple, citrus trees, cocoa, tea, banana, avocado, fig, guava, mango, olive, papaya, cashew, macadamia, almond, oats, vegetables, ornamentals, and conifers.

[0094] Vegetables include, but are not limited to, tomatoes, lettuce, green beans, lima beans, peas, and members of the genus Curcumis such as cucumber, cantaloupe, and musk melon. Ornamentals include, but are not limited to, azalea, hydrangea, hibiscus, roses, tulips, daffodils, petunias, carnation, poinsettia, and chrysanthemum. Preferably, plants of the present invention are crop plants (for example, maize, sorghum, wheat, sunflower, tomato, crucifers, peppers, potato, cotton, rice, soybean, sugarbeet, sugarcane, tobacco, barley, oilseed rape, etc.).

[0095] As used herein, the term plant includes plant cells, plant protoplasts, plant cell tissue cultures from which plants can be regenerated, plant calli, plant clumps, and plant cells that are intact in plants or parts of plants such as embryos, pollen, ovules, seeds, leaves, flowers, branches, fruit, kernels, ears, cobs, husks, stalks, roots, root tips, anthers, and the like. Grain is intended to mean the mature seed produced by commercial growers for purposes other than growing or reproducing the species. Progeny, variants, and mutants of the regenerated plants are also included within the scope of the invention, provided that these parts comprise the introduced polynucleotides. Further provided is a processed plant product or byproduct that retains the sequences disclosed herein, including for example, soymeal.

[0096] In another embodiment, the genes encoding the pesticidal proteins can be used to transform insect pathogenic organisms. Such organisms include baculoviruses, fungi, protozoa, bacteria, and nematodes. Microorganism hosts that are known to occupy the “phytosphere” (phylloplane, phyllosphere, rhizosphere, and/or rhizoplana) of one or more crops of interest may be selected. These microorganisms are selected so as to be capable of successfully competing in the particular environment with the wild-type microorganisms, provide for stable maintenance and expression of the gene expressing the pesticidal protein, and desirably, provide for improved protection of the pesticide from environmental degradation and inactivation.

[0097] Such microorganisms include archaea, bacteria, algae, and fungi. Of particular interest are microorganisms such as bacteria, e.g., Bacillus, Pseudomonas, Erwinia, Serratia, Klebsiella, Xanthomonas, Streptomyces, Rhizobium, Rhodopseudomonas, Methylius, Agrobacterium, Acetobacter, Lactobacillus, Arthrobacter, Azotobacter, Leuconostoc, and Alcaligenes. Fungi include yeast, e.g., Saccharomyces, Cryptococcus, Kluyveromyces, Sporobolomyces, Rhodotorula, and Aureobasidium. Of particular interest are such phytosphere bacterial species as Pseudomonas syringae, Pseudomonas aeruginosa, Pseudomonas fluorescens, Serratia marcescens, Acetobacter xylinum, Agrobacteria, Rhodopseudomonas spheroides, Xanthomonas campestris, Rhizobium melioti, Alcaligenes entrophus, Clavibacter xyli and Azotobacter vinlandir and phytosphere yeast species such as Rhodotorula rubra, R. glutinis, R. marina, R. aurantiaca, Cryptococcus albidus, C. diffluens, C. laurentii, Saccharomyces rosei, S. pretoriensis, S. cerevisiae, Sporobolomyces rosues, S. odorus, Kluyveromyces veronae, Aureobasidium pollulans, Bacillus thuringiensis, Escherichia coli, Bacillus subtilis, and the like.

[0098] Illustrative prokaryotes, both Gram-negative and gram-positive, include Enterobacteriaceae, such as Escherichia, Erwinia, Shigella, Salmonella, and Proteus; Bacillaceae; Rhizobiceae, such as Rhizobium; Spirillaceae, such as photobacterium, Zymomonas, Serratia, Aeromonas, Vibrio, Desulfovibrio, Spirillum; Lactobacillaceae; Pseudomonadaceae, such as Pseudomonas and Acetobacter; Azotobacteraceae and Nitrobacteraceae. Fungi include Phycomycetes and Ascomycetes, e.g., yeast, such as Saccharomyces and Schizosaccharomyces; and Basidiomycetes yeast, such as Rhodotorula, Aureobasidium, Sporobolomyces, and the like.

[0099] Genes encoding pesticidal proteins can be introduced by means of electrotransformation, PEG induced transformation, heat shock, transduction, conjugation, and the like. Specifically, genes encoding the pesticidal proteins can be cloned into a shuttle vector, for example, pHT3101 (Lerecius et al. (1989) FEMS Microbiol. Letts. 60: 211-218. The shuttle vector pHT3101 containing the coding sequence for the particular pesticidal protein gene can, for example, be transformed into the root-colonizing Bacillus by means of electroporation (Lerecius et al. (1989) FEMS Microbiol. Letts. 60: 211-218).

[0100] Expression systems can be designed so that pesticidal proteins are secreted outside the cytoplasm of gram-negative bacteria by fusing an appropriate signal peptide to the amino-terminal end of the pesticidal protein. Signal peptides recognized by E. coli include the OmpA protein (Ghrayeb et al. (1984) EMBO J, 3: 2437-2442).

[0101] Pesticidal proteins and active variants thereof can be fermented in a bacterial host and the resulting bacteria processed and used as a microbial spray in the same manner that Bacillus thuringiensis strains have been used as insecticidal sprays. In the case of a pesticidal protein(s) that is secreted from Bacillus, the secretion signal is removed or mutated using procedures known in the art. Such mutations and/or deletions prevent secretion of the pesticidal protein(s) into the growth medium during the fermentation process. The pesticidal proteins are retained within the cell, and the cells are then processed to yield the encapsulated pesticidal proteins.

[0102] Alternatively, the pesticidal proteins are produced by introducing heterologous genes into a cellular host. Expression of the heterologous gene results, directly or indirectly, in the intracellular production and maintenance of the pesticide. These cells are then treated under conditions that prolong the activity of the toxin produced in the cell when the cell is applied to the environment of target pest(s). The resulting product retains the toxicity of the toxin. These naturally encapsulated pesticidal proteins may then be formulated in accordance with conventional techniques for application to the environment hosting a target pest, e.g., soil, water, and foliage of plants. See, for example U.S. Pat. No. 6,468,523 and U.S. Publication No. 20050138685, and the references cited therein. In the present invention, a transformed microorganism (which includes whole organisms, cells, spore(s), pesticidal protein(s), pesticidal component(s), pest-impacting component(s), mutant(s), living or dead cells and cell components, including mixtures of living and dead cells and cell components, and including broken cells and cell components) or an isolated pesticidal protein can be formulated with an acceptable carrier into a pesticidal or agricultural composition(s) that is, for example, a suspension, a solution, an emulsion, a dusting powder, a dispersible granule, a wettable powder, and an emulsifiable concentrate, an aerosol, an impregnated granule, an adjuvant, a coatable paste, and also encapsulations in, for example, polymer substances.

[0103] Agricultural compositions may comprise a polypeptide, a recombinogenic polypeptide or a variant or fragment thereof, as disclosed herein. The agricultural composition disclosed herein may be applied to the environment of a plant or an area of cultivation, or applied to the plant, plant part, plant cell, or seed.

[0104] Such compositions disclosed above may be obtained by the addition of a surface-active agent, an inert carrier, a preservative, a humectant, a feeding stimulant, an attractant, an encapsulating agent, a binder, an emulsifier, a dye, a UV protectant, a buffer, a flow agent or fertilizers, micronutrient donors, or other preparations that influence plant growth. One or more agrochemicals including, but not limited to, herbicides, insecticides, fungicides, bactericides, nematicides, molluscicides, acaracides, plant growth regulators, harvest aids, and fertilizers, can be combined with carriers, surfactants or adjuvants customarily employed in the art of formulation or other components to facilitate product handling and application for particular target pests. Suitable carriers and adjuvants can be solid or liquid and correspond to the substances ordinarily employed in formulation technology, e.g., natural or regenerated mineral substances, solvents, dispersants, wetting agents, tackifiers, binders, or fertilizers. The active ingredients of the present invention are normally applied in the form of compositions and can be applied to the crop area, plant, or seed to be treated. For example, the compositions of the present invention may be applied to grain in preparation for or during storage in a grain bin or silo, etc. The compositions of the present invention may be applied simultaneously or in succession with other compounds. Methods of applying an active ingredient of the present invention or an agrochemical composition of the present invention that contains at least one of the pesticidal proteins produced by the bacterial strains of the present invention include, but are not limited to, foliar application, seed coating, and soil application. The number of applications and the rate of application depend on the intensity of infestation by the corresponding pest.

[0105] Suitable surface-active agents include, but are not limited to, anionic compounds such as a carboxylate of, for example, a metal; a carboxylate of a long chain fatty acid; an N-acylsarcosinate; mono or di-esters of phosphoric acid with fatty alcohol ethoxylates or salts of such esters; fatty alcohol sulfates such as sodium dodecyl sulfate, sodium octadecyl sulfate or sodium cetyl sulfate; ethoxylated fatty alcohol sulfates; ethoxylated alkylphenol sulfates; lignin sulfonates; petroleum sulfonates; alkyl aryl sulfonates such as alkyl-benzene sulfonates or lower alkylnaphtalene sulfonates, e.g., butyl-naphthalene sulfonate; salts of sulfonated naphthalene-formaldehyde condensates; salts of sulfonated phenol-formaldehyde condensates; more complex sulfonates such as the amide sulfonates, e.g., the sulfonated condensation product of oleic acid and N-methyl taurine; or the dialkyl sulfosuccinates, e.g., the sodium sulfonate of dioctyl succinate. Non-ionic agents include condensation products of fatty acid esters, fatty alcohols, fatty acid amides or fatty-alkyl- or alkenyl-substituted phenols with ethylene oxide, fatty esters of polyhydric alcohol ethers, e.g., sorbitan fatty acid esters, condensation products of such esters with ethylene oxide, e.g., polyoxyethylene sorbitar fatty acid esters, block copolymers of ethylene oxide and propylene oxide, acetylenic glycols such as 2,4,7,9-tetraethyl-5-decyn-4,7-diol, or ethoxylated acetylenic glycols. Examples of a cationic surface-active agent include, for instance, an aliphatic mono-, di-, or polyamine such as an acetate, naphthenate or oleate; or oxygen-containing amine such as an amine oxide of polyoxyethylene alkylamine; an amide-linked amine prepared by the condensation of a carboxylic acid with a di- or polyamine; or a quaternary ammonium salt.

[0106] Examples of inert materials include but are not limited to inorganic minerals such as kaolin, phyllosilicates, carbonates, sulfates, phosphates, or botanical materials such as cork, powdered corncobs, peanut hulls, rice hulls, and walnut shells.

[0107] The compositions of the present invention can be in a suitable form for direct application or as a concentrate of primary composition that requires dilution with a suitable quantity of water or other diluant before application. The pesticidal concentration will vary depending upon the nature of the particular formulation, specifically, whether it is a concentrate or to be used directly. The composition contains 1 to 98% of a solid or liquid inert carrier, and 0 to 50% or 0.1 to 50% of a surfactant. These compositions will be administered at the labeled rate for the commercial product, for example, about 0.01 lb-5.0 lb. per acre when in dry form and at about 0.01 pts.-10 pts. per acre when in liquid form.

[0108] In a further embodiment, the compositions, as well as the transformed microorganisms and pesticidal proteins, provided herein can be treated prior to formulation to prolong the pesticidal activity when applied to the environment of a target pest as long as the pretreatment is not deleterious to the pesticidal activity. Such treatment can be by chemical and/or physical means as long as the treatment does not deleteriously affect the properties of the composition(s). Examples of chemical reagents include but are not limited to halogenating agents; aldehydes such as formaldehyde and glutaraldehyde; anti-infectives, such as zephiran chloride; alcohols, such as isopropanol and ethanol; and histological fixatives, such as Bouin's fixative and Helly's fixative (see, for example, Humason (1967) Animal Tissue Techniques (W.H. Freeman and Co.).

[0109] In one aspect, pests may be killed or reduced in numbers in a given area by application of the pesticidal proteins of the invention to the area. Alternatively, the pesticidal proteins may be prophylactically applied to an environmental area to prevent infestation by a susceptible pest. Preferably the pest ingests, or is contacted with, a pesticidally-effective amount of the polypeptide. By “pesticidally-effective amount” is intended an amount of the pesticide that is able to bring about death to at least one pest, or to noticeably reduce pest growth, feeding, or normal physiological development. This amount will vary depending on such factors as, for example, the specific target pests to be controlled, the specific environment, location, plant, crop, or agricultural site to be treated, the environmental conditions, and the method, rate, concentration, stability, and quantity of application of the pesticidally-effective polypeptide composition. The formulations or compositions may also vary with respect to climatic conditions, environmental considerations, and/or frequency of application and/or severity of pest infestation.

[0110] The active ingredients are normally applied in the form of compositions and can be applied to the crop area, plant, or seed to be treated. Methods are therefore provided for providing to a plant, plant cell, seed, plant part or an area of cultivation, an effective amount of the agricultural composition comprising the polypeptide, recombinogenic polypeptide or an active variant or fragment thereof. By “effective amount” is intended an amount of a protein or composition sufficient to kill or control the pest or result in a noticeable reduction in pest growth, feeding, or normal physiological development. Such decreases in pest numbers, pest growth, pest feeding or pest normal development can comprise any statistically significant decrease, including, for example a decrease of about 5%, 10%, 15%, 20%, 25%, 30%, 35%, 40%, 45%, 50%, 55%, 60%, 65%, 70%, 75%, 85%, 90%, 95% or greater. For example, the compositions may be applied to grain in preparation for or during storage in a grain bin or silo, etc. The compositions may be applied simultaneously or in succession with other compounds. Methods of applying an active ingredient or an agrochemical composition comprising at least one of the polypeptides, recombinogenic polypeptides or variants or fragments thereof as disclosed herein, include but are not limited to, foliar application, seed coating, and soil application.

[0111] Methods for increasing plant yield are provided. The methods comprise providing a plant or plant cell expressing a polynucleotide encoding the pesticidal polypeptide sequence disclosed herein and growing the plant or a seed thereof in a field infested with (or susceptible to infestation by) a pest against which said polypeptide has pesticidal activity. In some embodiments, the polypeptide has pesticidal activity against a lepidopteran, coleopteran, dipteran, hemipteran, or nematode pest, and said field is infested with a lepidopteran, hemipteran, coleopteran, dipteran, or nematode pest. As defined herein, the “yield” of the plant refers to the quality and/or quantity of biomass produced by the plant. By “biomass” is intended any measured plant product. An increase in biomass production is any improvement in the yield of the measured plant product. Increasing plant yield has several commercial applications. For example, increasing plant leaf biomass may increase the yield of leafy vegetables for human or animal consumption. Additionally, increasing leaf biomass can be used to increase production of plant-derived pharmaceutical or industrial products. An increase in yield can comprise any statistically significant increase including, but not limited to, at least a 1% increase, at least a 3% increase, at least a 5% increase, at least a 10% increase, at least a 20% increase, at least a 30%, at least a 50%, at least a 70%, at least a 100% or a greater increase in yield compared to a plant not expressing the pesticidal sequence. In specific methods, plant yield is increased as a result of improved pest resistance of a plant expressing a pesticidal protein disclosed herein. Expression of the pesticidal protein results in a reduced ability of a pest to infest or feed.

[0112] The plants can also be treated with one or more chemical compositions, including one or more herbicide, insecticides, or fungicides.

[0113] Non-limiting embodiments include:

[0114] 1. An isolated polypeptide having insecticidal activity, comprising:

[0115] (a) a polypeptide comprising an amino acid sequence selected from the group consisting of sequences set forth in SEQ ID NOs: 1, 2, 3, 4, 5, 6, 7, 8, 9, 10, 11, 12, 13, 14, 15, 16, 17, 18, 19, 20, 21, 22, 23, 24, 25, 26, 27, 28, 29, 30, 31, 32, 33, 34, 35, 36, 37, 38, 39, 40, 41, 42, 43, 44, 45, 46, 47, 48, 49, 50, 51, 52, 53, 54, 55, 56, 57, 58, 59, 60, 61, 62, 63, 64, 65, 66, 67, 68, 69, 70, 71, 72, 73, 74, 75, 76, 77, 78, 79, 80, 81, 82, 83, 84, 85, 86, 87, 88, 89, 90, 91, 92, 93, 94, 95, 96, 97, 98, 99, 100, 101, 102, 103, 104, 105, 106, 107, 108, 109, 110, 111, 112, 113, 114, 115, 116, 117, 118, 119, 120, 121, 122, 123, 124, 125, 126, 127, 128, 129, 130, 131, 132, 133, 134, 135, 136, 137, 138, 139, 140, 141, 142, 143, 144, 145, 146, 147, 148, 149, 150, 151, 152, 153, 154, 155, 156, 157, 158, 159, 160, 161, 162, 163, 164, 165, 166, 167, 168, 169, 170, 171, 172, 173, 174, 175, 176, 177, 178, 179, 180, 181, 182, 183, 184, 185, 186, 187, 188, 189, 190, 191, 192, 193, 194, 195, 196, 197, 198, 199, 200, 201, 202, 203, 204, 205, 206, 207, 208, 209, 210, 211, 212, 213, 214, 215, 216, 217, 218, 219, 220, 221, 222, 223, 224, 225, 226, 227, 228, or 229; or

[0116] (b) a polypeptide comprising an amino acid sequence having at least the percent sequence identity set forth in Table 1 to an amino acid sequence selected from the group consisting of sequences set forth in SEQ ID NOs: 1, 2, 3, 4, 5, 6, 7, 8, 9, 10, 11, 12, 13, 14, 15, 16, 17, 18, 19, 20, 21, 22, 23, 24, 25, 26, 27, 28, 29, 30, 31, 32, 33, 34, 35, 36, 37, 38, 39, 40, 41, 42, 43, 44, 45, 46, 47, 48, 49, 50, 51, 52, 53, 54, 55, 56, 57, 58, 59, 60, 61, 62, 63, 64, 65, 66, 67, 68, 69, 70, 71, 72, 73, 74, 75, 76, 77, 78, 79, 80, 81, 82, 83, 84, 85, 86, 87, 88, 89, 90, 91, 92, 93, 94, 95, 96, 97, 98, 99, 100, 101, 102, 103, 104, 105, 106, 107, 108, 109, 110, 111, 112, 113, 114, 115, 116, 117, 118, 119, 120, 121, 122, 123, 124, 125, 126, 127, 128, 129, 130, 131, 132, 133, 134, 135, 136, 137, 138, 139, 140, 141, 142, 143, 144, 145, 146, 147, 148, 149, 150, 151, 152, 153, 154, 155, 156, 157, 158, 159, 160, 161, 162, 163, 164, 165, 166, 167, 168, 169, 170, 171, 172, 173, 174, 175, 176, 177, 178, 179, 180, 181, 182, 183, 184, 185, 186, 187, 188, 189, 190, 191, 192, 193, 194, 195, 196, 197, 198, 199, 200, 201, 202, 203, 204, 205, 206, 207, 208, 209, 210, 211, 212, 213, 214, 215, 216, 217, 218, 219, 220, 221, 222, 223, 224, 225, 226, 227, 228, or 229.

[0117] 2. The polypeptide of embodiment 1, wherein said polypeptide comprises the amino acid sequence set forth in SEQ ID Nos. 1, 2, 3, 4, 5, 6, 7, 8, 9, 10, 11, 12, 13, 14, 15, 16, 17, 18, 19, 20, 21, 22, 23, 24, 25, 26, 27, 28, 29, 30, 31, 32, 33, 34, 35, 36, 37, 38, 39, 40, 41, 42, 43, 44, 45, 46, 47, 48, 49, 50, 51, 52, 53, 54, 55, 56, 57, 58, 59, 60, 61, 62, 63, 64, 65, 66, 67, 68, 69, 70, 71, 72, 73, 74, 75, 76, 77, 78, 79, 80, 81, 82, 83, 84, 85, 86, 87, 88, 89, 90, 91, 92, 93, 94, 95, 96, 97, 98, 99, 100, 101, 102, 103, 104, 105, 106, 107, 108, 109, 110, 111, 112, 113, 114, 115, 116, 117, 118, 119, 120, 121, 122, 123, 124, 125, 126, 127, 128, 129, 130, 131, 132, 133, 134, 135, 136, 137, 138, 139, 140, 141, 142, 143, 144, 145, 146, 147, 148, 149, 150, 151, 152, 153, 154, 155, 156, 157, 158, 159, 160, 161, 162, 163, 164, 165, 166, 167, 168, 169, 170, 171, 172, 173, 174, 175, 176, 177, 178, 179, 180, 181, 182, 183, 184, 185, 186, 187, 188, 189, 190, 191, 192, 193, 194, 195, 196, 197, 198, 199, 200, 201, 202, 203, 204, 205, 206, 207, 208, 209, 210, 211, 212, 213, 214, 215, 216, 217, 218, 219, 220, 221, 222, 223, 224, 225, 226, 227, 228, or 229.

[0118] 3. The polypeptide of embodiment 1 or 2, further comprising heterologous amino acid sequences.

[0119] 4. A composition comprising the polypeptide of any one of embodiments 1 to 3.

[0120] 5. A recombinant nucleic acid molecule that encodes the polypeptide of any one of embodiments 1 to 3, wherein said recombinant nucleic acid molecule is not the naturally occurring sequence encoding said polypeptide.

[0121] 6. The recombinant nucleic acid of embodiment 5, wherein said nucleic acid molecule is a synthetic sequence that has been designed for expression in a plant.

[0122] 7. The recombinant nucleic acid molecule of embodiment 5 or 6, wherein said nucleic acid molecule is operably linked to a promoter capable of directing expression in a plant cell.

[0123] 8. The recombinant nucleic acid molecule of embodiment 5 or 6, wherein said nucleic acid molecule is operably linked to a promoter capable of directing expression in a bacteria.

[0124] 9. A host cell that contains the recombinant nucleic acid molecule of any one of embodiments 5 to 8.

[0125] 10. The host cell of embodiment 9, wherein said host cell is a bacterial host cell.

[0126] 11. A DNA construct comprising a promoter that drives expression in a plant cell operably linked to a recombinant nucleic acid molecule comprising:

[0127] (a) a nucleotide sequence that encodes a polypeptide comprising the amino acid sequence of any one of SEQ ID NOs: 1, 2, 3, 4, 5, 6, 7, 8, 9, 10, 11, 12, 13, 14, 15, 16, 17, 18, 19, 20, 21, 22, 23, 24, 25, 26, 27, 28, 29, 30, 31, 32, 33, 34, 35, 36, 37, 38, 39, 40, 41, 42, 43, 44, 45, 46, 47, 48, 49, 50, 51, 52, 53, 54, 55, 56, 57, 58, 59, 60, 61, 62, 63, 64, 65, 66, 67, 68, 69, 70, 71, 72, 73, 74, 75, 76, 77, 78, 79, 80, 81, 82, 83, 84, 85, 86, 87, 88, 89, 90, 91, 92, 93, 94, 95, 96, 97, 98, 99, 100, 101, 102, 103, 104, 105, 106, 107, 108, 109, 110, 111, 112, 113, 114, 115, 116, 117, 118, 119, 120, 121, 122, 123, 124, 125, 126, 127, 128, 129, 130, 131, 132, 133, 134, 135, 136, 137, 138, 139, 140, 141, 142, 143, 144, 145, 146, 147, 148, 149, 150, 151, 152, 153, 154, 155, 156, 157, 158, 159, 160, 161, 162, 163, 164, 165, 166, 167, 168, 169, 170, 171, 172, 173, 174, 175, 176, 177, 178, 179, 180, 181, 182, 183, 184, 185, 186, 187, 188, 189, 190, 191, 192, 193, 194, 195, 196, 197, 198, 199, 200, 201, 202, 203, 204, 205, 206, 207, 208, 209, 210, 211, 212, 213, 214, 215, 216, 217, 218, 219, 220, 221, 222, 223, 224, 225, 226, 227, 228, or 229; or,

[0128] (b) a nucleotide sequence that encodes a polypeptide comprising an amino acid sequence having at least the percent sequence identity set forth in Table 1 to an amino acid sequence selected from the group consisting of sequences set forth in SEQ ID NOs: 1, 2, 3, 4, 5, 6, 7, 8, 9, 10, 11, 12, 13, 14, 15, 16, 17, 18, 19, 20, 21, 22, 23, 24, 25, 26, 27, 28, 29, 30, 31, 32, 33, 34, 35, 36, 37, 38, 39, 40, 41, 42, 43, 44, 45, 46, 47, 48, 49, 50, 51, 52, 53, 54, 55, 56, 57, 58, 59, 60, 61, 62, 63, 64, 65, 66, 67, 68, 69, 70, 71, 72, 73, 74, 75, 76, 77, 78, 79, 80, 81, 82, 83, 84, 85, 86, 87, 88, 89, 90, 91, 92, 93, 94, 95, 96, 97, 98, 99, 100, 101, 102, 103, 104, 105, 106, 107, 108, 109, 110, 111, 112, 113, 114, 115, 116, 117, 118, 119, 120, 121, 122, 123, 124, 125, 126, 127, 128, 129, 130, 131, 132, 133, 134, 135, 136, 137, 138, 139, 140, 141, 142, 143, 144, 145, 146, 147, 148, 149, 150, 151, 152, 153, 154, 155, 156, 157, 158, 159, 160, 161, 162, 163, 164, 165, 166, 167, 168, 169, 170, 171, 172, 173, 174, 175, 176, 177, 178, 179, 180, 181, 182, 183, 184, 185, 186, 187, 188, 189, 190, 191, 192, 193, 194, 195, 196, 197, 198, 199, 200, 201, 202, 203, 204, 205, 206, 207, 208, 209, 210, 211, 212, 213, 214, 215, 216, 217, 218, 219, 220, 221, 222, 223, 224, 225, 226, 227, 228, or 229.

[0129] 12. The DNA construct of embodiment 11, wherein said nucleotide sequence is a synthetic DNA sequence that has been designed for expression in a plant.

[0130] 13. A vector comprising the DNA construct of embodiment 11 or 12.

[0131] 14. A host cell that contains the DNA construct of embodiment 11 or 12 or the vector of embodiment 13.

[0132] 15. The host cell of embodiment 13 or 14, wherein the host cell is a plant cell.

[0133] 16. A transgenic plant comprising the host cell of embodiment 15.

[0134] 17. A composition comprising the host cell of any one of embodiments 9, 10, 14, or 15.

[0135] 18. The composition of embodiment 17, wherein said composition is selected from the group consisting of a powder, dust, pellet, granule, spray, emulsion, colloid, and solution.

[0136] 19. The composition of embodiment 17 or 18, wherein said composition comprises from about 1% to about 99% by weight of said polypeptide.

[0137] 20. A method for controlling a pest population comprising contacting said population with a pesticidal-effective amount of the composition of any one of embodiments 17 to 19.

[0138] 21. A method for killing a pest population comprising contacting said population with a pesticidal-effective amount of the composition of any one of embodiments 17 to 19.

[0139] 22. A method for producing a polypeptide with pesticidal activity, comprising culturing the host cell of any one of embodiments 9, 10, 14, or 15 under conditions in which the nucleic acid molecule encoding the polypeptide is expressed.

[0140] 23. A plant having stably incorporated into its genome a DNA construct comprising a nucleotide sequence that encodes a protein having pesticidal activity, wherein said nucleotide sequence comprises:

[0141] (a) a nucleotide sequence that encodes a polypeptide comprising the amino acid sequence of any one of SEQ ID NOs: 1, 2, 3, 4, 5, 6, 7, 8, 9, 10, 11, 12, 13, 14, 15, 16, 17, 18, 19, 20, 21, 22, 23, 24, 25, 26, 27, 28, 29, 30, 31, 32, 33, 34, 35, 36, 37, 38, 39, 40, 41, 42, 43, 44, 45, 46, 47, 48, 49, 50, 51, 52, 53, 54, 55, 56, 57, 58, 59, 60, 61, 62, 63, 64, 65, 66, 67, 68, 69, 70, 71, 72, 73, 74, 75, 76, 77, 78, 79, 80, 81, 82, 83, 84, 85, 86, 87, 88, 89, 90, 91, 92, 93, 94, 95, 96, 97, 98, 99, 100, 101, 102, 103, 104, 105, 106, 107, 108, 109, 110, 111, 112, 113, 114, 115, 116, 117, 118, 119, 120, 121, 122, 123, 124, 125, 126, 127, 128, 129, 130, 131, 132, 133, 134, 135, 136, 137, 138, 139, 140, 141, 142, 143, 144, 145, 146, 147, 148, 149, 150, 151, 152, 153, 154, 155, 156, 157, 158, 159, 160, 161, 162, 163, 164, 165, 166, 167, 168, 169, 170, 171, 172, 173, 174, 175, 176, 177, 178, 179, 180, 181, 182, 183, 184, 185, 186, 187, 188, 189, 190, 191, 192, 193, 194, 195, 196, 197, 198, 199, 200, 201, 202, 203, 204, 205, 206, 207, 208, 209, 210, 211, 212, 213, 214, 215, 216, 217, 218, 219, 220, 221, 222, 223, 224, 225, 226, 227, 228, or 229; or,

[0142] (b) a nucleotide sequence that encodes a polypeptide comprising an amino acid sequence having at least the percent sequence identity set forth in Table 1 to an amino acid sequence selected from the group consisting of sequences set forth in SEQ ID NOs: 1, 2, 3, 4, 5, 6, 7, 8, 9, 10, 11, 12, 13, 14, 15, 16, 17, 18, 19, 20, 21, 22, 23, 24, 25, 26, 27, 28, 29, 30, 31, 32, 33, 34, 35, 36, 37, 38, 39, 40, 41, 42, 43, 44, 45, 46, 47, 48, 49, 50, 51, 52, 53, 54, 55, 56, 57, 58, 59, 60, 61, 62, 63, 64, 65, 66, 67, 68, 69, 70, 71, 72, 73, 74, 75, 76, 77, 78, 79, 80, 81, 82, 83, 84, 85, 86, 87, 88, 89, 90, 91, 92, 93, 94, 95, 96, 97, 98, 99, 100, 101, 102, 103, 104, 105, 106, 107, 108, 109, 110, 111, 112, 113, 114, 115, 116, 117, 118, 119, 120, 121, 122, 123, 124, 125, 126, 127, 128, 129, 130, 131, 132, 133, 134, 135, 136, 137, 138, 139, 140, 141, 142, 143, 144, 145, 146, 147, 148, 149, 150, 151, 152, 153, 154, 155, 156, 157, 158, 159, 160, 161, 162, 163, 164, 165, 166, 167, 168, 169, 170, 171, 172, 173, 174, 175, 176, 177, 178, 179, 180, 181, 182, 183, 184, 185, 186, 187, 188, 189, 190, 191, 192, 193, 194, 195, 196, 197, 198, 199, 200, 201, 202, 203, 204, 205, 206, 207, 208, 209, 210, 211, 212, 213, 214, 215, 216, 217, 218, 219, 220, 221, 222, 223, 224, 225, 226, 227, 228, or 229.

[0143] 24. A transgenic seed of the plant of embodiment 23.

[0144] 25. A method for protecting a plant from an insect pest, comprising expressing in a plant or cell thereof a nucleotide sequence that encodes a pesticidal polypeptide, wherein said nucleotide sequence comprising:

[0145] (a) a nucleotide sequence that encodes a polypeptide comprising the amino acid sequence of any one of SEQ ID NOs: 1, 2, 3, 4, 5, 6, 7, 8, 9, 10, 11, 12, 13, 14, 15, 16, 17, 18, 19, 20, 21, 22, 23, 24, 25, 26, 27, 28, 29, 30, 31, 32, 33, 34, 35, 36, 37, 38, 39, 40, 41, 42, 43, 44, 45, 46, 47, 48, 49, 50, 51, 52, 53, 54, 55, 56, 57, 58, 59, 60, 61, 62, 63, 64, 65, 66, 67, 68, 69, 70, 71, 72, 73, 74, 75, 76, 77, 78, 79, 80, 81, 82, 83, 84, 85, 86, 87, 88, 89, 90, 91, 92, 93, 94, 95, 96, 97, 98, 99, 100, 101, 102, 103, 104, 105, 106, 107, 108, 109, 110, 111, 112, 113, 114, 115, 116, 117, 118, 119, 120, 121, 122, 123, 124, 125, 126, 127, 128, 129, 130, 131, 132, 133, 134, 135, 136, 137, 138, 139, 140, 141, 142, 143, 144, 145, 146, 147, 148, 149, 150, 151, 152, 153, 154, 155, 156, 157, 158, 159, 160, 161, 162, 163, 164, 165, 166, 167, 168, 169, 170, 171, 172, 173, 174, 175, 176, 177, 178, 179, 180, 181, 182, 183, 184, 185, 186, 187, 188, 189, 190, 191, 192, 193, 194, 195, 196, 197, 198, 199, 200, 201, 202, 203, 204, 205, 206, 207, 208, 209, 210, 211, 212, 213, 214, 215, 216, 217, 218, 219, 220, 221, 222, 223, 224, 225, 226, 227, 228, or 229; or,

[0146] (b) a nucleotide sequence that encodes a polypeptide comprising an amino acid sequence having at least the percent sequence identity set forth in Table 1 to an amino acid sequence selected from the group consisting of sequences set forth in SEQ ID NOs: 1, 2, 3, 4, 5, 6, 7, 8, 9, 10, 11, 12, 13, 14, 15, 16, 17, 18, 19, 20, 21, 22, 23, 24, 25, 26, 27, 28, 29, 30, 31, 32, 33, 34, 35, 36, 37, 38, 39, 40, 41, 42, 43, 44, 45, 46, 47, 48, 49, 50, 51, 52, 53, 54, 55, 56, 57, 58, 59, 60, 61, 62, 63, 64, 65, 66, 67, 68, 69, 70, 71, 72, 73, 74, 75, 76, 77, 78, 79, 80, 81, 82, 83, 84, 85, 86, 87, 88, 89, 90, 91, 92, 93, 94, 95, 96, 97, 98, 99, 100, 101, 102, 103, 104, 105, 106, 107, 108, 109, 110, 111, 112, 113, 114, 115, 116, 117, 118, 119, 120, 121, 122, 123, 124, 125, 126, 127, 128, 129, 130, 131, 132, 133, 134, 135, 136, 137, 138, 139, 140, 141, 142, 143, 144, 145, 146, 147, 148, 149, 150, 151, 152, 153, 154, 155, 156, 157, 158, 159, 160, 161, 162, 163, 164, 165, 166, 167, 168, 169, 170, 171, 172, 173, 174, 175, 176, 177, 178, 179, 180, 181, 182, 183, 184, 185, 186, 187, 188, 189, 190, 191, 192, 193, 194, 195, 196, 197, 198, 199, 200, 201, 202, 203, 204, 205, 206, 207, 208, 209, 210, 211, 212, 213, 214, 215, 216, 217, 218, 219, 220, 221, 222, 223, 224, 225, 226, 227, 228, or 229.

[0147] 26. The method of embodiment 25, wherein said plant produces a pesticidal polypeptide having pesticidal activity against a lepidopteran or coleopteran pest.

[0148] 27. A method for increasing yield in a plant comprising growing in a field a plant or seed thereof having stably incorporated into its genome a DNA construct comprising a promoter that drives expression in a plant operably linked to a nucleotide sequence that encodes a pesticidal polypeptide, wherein said nucleotide sequence comprises:

[0149] (a) a nucleotide sequence that encodes a polypeptide comprising the amino acid sequence of any one of SEQ ID NOs: 1, 2, 3, 4, 5, 6, 7, 8, 9, 10, 11, 12, 13, 14, 15, 16, 17, 18, 19, 20, 21, 22, 23, 24, 25, 26, 27, 28, 29, 30, 31, 32, 33, 34, 35, 36, 37, 38, 39, 40, 41, 42, 43, 44, 45, 46, 47, 48, 49, 50, 51, 52, 53, 54, 55, 56, 57, 58, 59, 60, 61, 62, 63, 64, 65, 66, 67, 68, 69, 70, 71, 72, 73, 74, 75, 76, 77, 78, 79, 80, 81, 82, 83, 84, 85, 86, 87, 88, 89, 90, 91, 92, 93, 94, 95, 96, 97, 98, 99, 100, 101, 102, 103, 104, 105, 106, 107, 108, 109, 110, 111, 112, 113, 114, 115, 116, 117, 118, 119, 120, 121, 122, 123, 124, 125, 126, 127, 128, 129, 130, 131, 132, 133, 134, 135, 136, 137, 138, 139, 140, 141, 142, 143, 144, 145, 146, 147, 148, 149, 150, 151, 152, 153, 154, 155, 156, 157, 158, 159, 160, 161, 162, 163, 164, 165, 166, 167, 168, 169, 170, 171, 172, 173, 174, 175, 176, 177, 178, 179, 180, 181, 182, 183, 184, 185, 186, 187, 188, 189, 190, 191, 192, 193, 194, 195, 196, 197, 198, 199, 200, 201, 202, 203, 204, 205, 206, 207, 208, 209, 210, 211, 212, 213, 214, 215, 216, 217, 218, 219, 220, 221, 222, 223, 224, 225, 226, 227, 228, or 229; or,

[0150] (b) a nucleotide sequence that encodes a polypeptide comprising an amino acid sequence having at least the percent sequence identity set forth in Table 1 to an amino acid sequence selected from the group consisting of sequences set forth in SEQ ID NOs: 1, 2, 3, 4, 5, 6, 7, 8, 9, 10, 11, 12, 13, 14, 15, 16, 17, 18, 19, 20, 21, 22, 23, 24, 25, 26, 27, 28, 29, 30, 31, 32, 33, 34, 35, 36, 37, 38, 39, 40, 41, 42, 43, 44, 45, 46, 47, 48, 49, 50, 51, 52, 53, 54, 55, 56, 57, 58, 59, 60, 61, 62, 63, 64, 65, 66, 67, 68, 69, 70, 71, 72, 73, 74, 75, 76, 77, 78, 79, 80, 81, 82, 83, 84, 85, 86, 87, 88, 89, 90, 91, 92, 93, 94, 95, 96, 97, 98, 99, 100, 101, 102, 103, 104, 105, 106, 107, 108, 109, 110, 111, 112, 113, 114, 115, 116, 117, 118, 119, 120, 121, 122, 123, 124, 125, 126, 127, 128, 129, 130, 131, 132, 133, 134, 135, 136, 137, 138, 139, 140, 141, 142, 143, 144, 145, 146, 147, 148, 149, 150, 151, 152, 153, 154, 155, 156, 157, 158, 159, 160, 161, 162, 163, 164, 165, 166, 167, 168, 169, 170, 171, 172, 173, 174, 175, 176, 177, 178, 179, 180, 181, 182, 183, 184, 185, 186, 187, 188, 189, 190, 191, 192, 193, 194, 195, 196, 197, 198, 199, 200, 201, 202, 203, 204, 205, 206, 207, 208, 209, 210, 211, 212, 213, 214, 215, 216, 217, 218, 219, 220, 221, 222, 223, 224, 225, 226, 227, 228, or 229.

[0151] 28. A method of obtaining a polynucleotide that encodes an improved polypeptide comprising pesticidal activity is provided, wherein the improved polypeptide has at least one improved property over any one of SEQ ID NOS: 1-229 comprising:

[0152] (a) recombining a plurality of parental polynucleotides comprising SEQ ID NO: 1-229 or an active variant or fragment thereof to produce a library of recombinant polynucleotides encoding recombinant pesticidal polypeptides;

[0153] (b) screening the library to identify a recombinant polynucleotide that encodes an improved recombinant pesticidal polypeptide that has an enhanced property improved over the parental polynucleotide;

[0154] (c) recovering the recombinant polynucleotide that encodes the improved recombinant pesticidal polypeptide identified in (b); and,

[0155] (d) repeating steps (a), (b) and (c) using the recombinant polynucleotide recovered in step (c) as one of the plurality of parental polynucleotides in repeated step (a).

[0156] The following examples are offered by way of illustration and not by way of limitation.

### EXPERIMENTAL

### Experiment 1

### Discovery of Novel Genes by Sequencing and DNA Analysis

[0157] Microbial cultures were grown in liquid culture in standard laboratory media. Cultures were grown to saturation (16 to 24 hours) before DNA preparation. DNA was extracted from bacterial cells by detergent lysis, followed by binding to a silica matrix and washing with an ethanol buffer. Purified DNA was eluted from the silica matrix with a mildly alkaline aqueous buffer.

[0158] DNA for sequencing was tested for purity and concentration by spectrophotometry. Sequencing libraries were prepared using the Nextera XT library preparation kit according to the manufacturer's protocol. Sequence data was generated on a HiSeq 2000 according to the Illumina HiSeq 2000 System User Guide protocol.

[0159] Sequencing reads were assembled into draft genomes using the CLC Bio Assembly Cell software package. Following assembly, gene calls were made by several methods and resulting gene sequences were interrogated to identify novel homologs of pesticidal genes. Novel genes were identified by BLAST, by domain composition, and by pairwise alignment versus a target set of pesticidal genes. A summary of such sequences is set forth in Table 1.

[0160] Genes identified in the homology search were amplified from bacterial DNA by PCR and cloned into bacterial expression vectors containing fused in-frame purification tags. Cloned genes were expressed in E. coli and purified by column chromatography. Purified proteins were assessed in insect diet bioassay studies to identify active proteins.

[0161] Insect diet bioassays were performed using a wheat germ and agar artificial diet to which purified protein were applied as a surface treatment. Insect larvae were applied to treated diet and monitored for mortality.

[0162] Insect diet bioassays were performed using a sucrose liquid diet contained in a membrane sachet to which purified protein was added. Insect nymphs were allowed to feed on the diet sachet and were monitored for mortality. Insects tested in bioassays included the Brown Stink Bug (BSB), Euschistus servus, and the Southern Green Stink Bug (SGSB), Nezara viridula. Data is listed in the below in Table 3.

TABLE 3

| Gene | Expression Level | Test 1 | Test 2 | Test 3 |
|---|---|---|---|---|
| APG00059 | Very Low (<10 ppm) | +BSB | +SGSB | +SGSB |
| APG00046 | High (>500 ppm) | +BSB | +BSB | |
| APG00002 | Low (50 ppm) | +SGSB | +SGSB | +SGSB |

BSB = Brown Stink Bug,
SGSB = Southern Green Stink Bug

### Example 2

### Heterologous Expression in E. coli

[0163] Each open reading frame set forth in Tables 4 and 5 was cloned into an E. coli expression vector containing a maltose binding protein (pMBP). The expression vector was transformed into BL21*RIPL. An LB culture supplemented with carbenicillin was inoculated with a single colony and grown overnight at 37° C. using 0.5% of the overnight culture, a fresh culture was inoculated and grown to logarithmic phase at 37° C. The culture was induced using 250 mM IPTG for 18 hours at 16° C. The cells were pelleted and resuspended in 10 mM Tris pH7.4 and 150 mM NaCl supplemented with protease inhibitors. The protein expression was evaluated by SDS-PAGE.

### Example 3

### Pesticidal Activity Against Coleopteran and Lepidoptera

[0164] Protein Expression:

[0165] Each sequence set forth in Table 4 was expressed in E. coli as described in Example 2. 400 mL of LB was inoculated and grown to an OD600 of 0.6. The culture was induced with 0.25 mM IPTG overnight at 16° C. The cells were spun down and the cell pellet was resuspend in 5 mL of buffer. The resuspension was sonicated for 2 min on ice.

[0166] Bioassay:

[0167] Fall army worm (FAW), corn ear worm (CEW), European corn borer (ECB) southwestern corn borer (SWCB) and diamond backed moth (DBM or Px) eggs were purchased from a commercial insectary (Benzon Research Inc., Carlisle, Pa.). The FAW, CEW, ECB and BCW eggs were incubated to the point that eclosion would occur within 12 hrs of the assay setup. SWCB and DBM were introduced to the assay as neonate larvae. Assays were carried out in 24-well trays containing multispecies lepidopteran diet (Southland Products Inc., Lake Village, Ark.). Samples of the sonicated lysate were applied to the surface of the diet (diet overlay) and allowed to evaporate and soak into the diet. For CEW, FAW, BCW, ECB and SWCB, a 125 μl of sonicated lysate was added to the diet surface and dried. For DBM, 50 μl of a 1:2 dilution of sonicated lysate was added to the diet surface. The bioassay plates were sealed with a plate sealing film vented with pin holes. The plates were incubated at 26° C. at 65% relative humidity (RH) on a 16:8 day:night cycle in a Percival for 5 days. The assays were assessed for level of mortality, growth inhibition and feeding inhibition.

[0168] For the western corn rootworm bioassay, the protein construct/lysate was evaluated in an insect bioassay by dispensing 60 μl volume on the top surface of diet in well/s of 24-well plate (Cellstar, 24-well, Greiner Bio One) and allowed to dry. Each well contained 500 μl diet (Marrone et al., 1985). Fifteen to twenty neonate larvae were introduced in each well using a fine tip paint brush and the plate was covered with membrane (Viewseal, Greiner Bio One). The bioassay was stored at ambient temperature and scored for mortality, and/or growth/feeding inhibition at day 4.

[0169] For Colorado Potato Beetle (CPB) a cork bore size No. 8 leaf disk was excised from potato leaf and was dipped in the protein construct/lysate until thoroughly wet and placed on top of filter disk (Millipore, glass fiber filter, 13 mm). 60 μl dH₂O was added to each filter disk and placed in each well of 24-well plate (Cellstar, 24-well, Greiner Bio One). The leaf disk was allowed to dry and five to seven first instar larvae were introduced in each well using a fine tip paint brush. The plate was covered with membrane (Viewseal, Greiner Bio One) and small hole was punctured in each well of the membrane. The construct was evaluated with four replicates, and scored for mortality and leaf damage on day 3.

[0170] Table 4 provides a summary of pesticidal activity against coleopteran and lepidoptera of the various sequences. Table code: “−” indicates no activity seen; “+” indicates pesticidal activity seen; “NT” indicates not tested; “S” indicates stunt; “SS” indicates slight stunt; “LF” indicates low feeding, “M” indicates mortality.

TABLE 4
Summary of Pesticidal Activity against Coleopteran and Lepidoptera.

| APG | Seq ID | FAW | CEW | BCW | ECB | SWCB | CPB | Px | WCR Mortality (%) |
|---|---|---|---|---|---|---|---|---|---|
| APG00003 | 5 | SS | SS | − | − | SS | NT | − | 0-50% mortality |
| APG00006 | 10 | M, S | − | − | − | − | NT | NT | 0-50% mortality |
| APG00014 | 24 | SS | − | − | − | − | NT | + | 80-100% mortality |
| APG00016 | 27 | S | − | − | − | SS | NT | + | 80-100% mortality |
| APG00024 | 40 | SS | − | − | − | − | NT | NT | 80-100% mortality |
| APG00025 | 41 | − | − | − | − | − | − | − | 0-60% mortality |
| APG00026 | 45 | M, S | SS | − | − | − | − | + | NT |
| APG00028 | 47 | − | − | − | − | − | − | − | 0-60% mortality |
| APG00029 | 49 | − | − | − | − | SS | + | − | 60-100% mortality |
| APG00030 | 51 | − | − | − | − | SS | NT | − | NT |
| APG00031 | 52 | − | − | − | − | NT | NT | NT | NT |
| APG00032 | 56 | SS | − | − | − | − | NT | NT | 0-50% mortality |
| APG00035 | 59 | − | − | − | − | − | − | − | 80-100% mortality |
| APG00040 | 62 | S | − | SS | − | SS | NT | − | 50-80% mortality |
| APG00041 | 64 | − | − | − | − | − | + | − | 0-60% mortality |
| APG00042 | 67 | S | − | − | − | − | NT | NT | NT |
| APG00047 | 77 | S | − | − | − | − | NT | − | 50-80% mortality |
| APG00049 | 79 | − | SS | − | NT | NT | NT | − | 50-80% mortality |
| APG00049 | 79 | NT | NT | NT | NT | NT | NT | NT | 50% mortality |
| APG00050 | 80 | − | − | − | − | − | + | − | 80-100% mortality |
| APG00055 | 87 | S | − | SS | SS | − | NT | + | 80-100% mortality |
| APG00061 | 92 | SS | − | − | − | − | NT | − | NT |
| APG00077 | 100 | − | − | − | − | − | − | − | 0-60% mortality |
| APG00080 | 102 | − | − | − | − | − | − | − | 0-60% mortality |
| APG00082 | 108 | − | − | − | − | − | NT | − | 80-100% mortality |
| APG00083 | 111 | − | − | − | − | SS | NT | − | NT |
| APG00093 | 124 | − | − | − | − | − | − | − | 0-60% mortality |
| APG00098 | 129 | S | − | − | − | S | NT | − | 50-80% mortality |
| APG00102 | 131 | SS | − | − | − | − | NT | NT | NT |
| APG00103 | 132 | − | − | − | − | − | NT | − | 80-100% mortality |
| APG00106 | 134 | SS | − | − | − | − | + | NT | 50-80% mortality |
| APG00109 | 136 | − | − | − | − | NT | − | NT | 0-50% mortality |
| APG00111 | 140 | − | − | − | − | − | − | − | 80-100% mortality |
| APG00123 | 148 | − | − | − | − | − | + | | 80-100% mortality |
| APG00125 | 151 | M, S | − | − | − | − | NT | | NT |
| APG00127 | 156 | − | − | − | − | − | NT | | 80-100% mortality |
| APG00128 | 157 | NT | NT | NT | NT | NT | NT | NT | 50-100% % mortality |
| APG00129 | 159 | − | SS | − | − | − | NT | | NT |
| APG00142 | 162 | SS | − | SS | − | SS | NT | | 80-100% mortality |
| APG00145 | 164 | − | − | − | − | − | NT | | 0-50% mortality |
| APG00146 | 167 | − | − | − | − | − | NT | | 80-100% mortality |
| APG00149 | 172 | − | − | − | − | − | NT | | 80-100% mortality |
| APG00167 | 180 | HM, S | − | − | − | − | NT | | 60-100% mortality |
| APG00169 | 181 | − | − | − | − | − | − | | 80-100% mortality |
| APG00174 | 185 | − | − | − | − | − | NT | | 80-100% mortality |
| APG00206 | 199 | − | − | − | − | − | NT | | 80-100% mortality |
| APG00222 | 204 | − | − | − | − | − | NT | | 50-80% mortality |
| APG00234 | 208 | − | − | − | − | − | NT | | 0-50% mortality |
| APG00299 | 213 | − | − | − | − | − | − | | 0-60% mortality |

### Example 4

### Pesticidal Activity Against Hemipteran

[0171] Protein Expression: Each of the sequences set forth in Table 5 was expressed in E. coli as described in Example 2. 400 mL of LB was inoculated and grown to an OD600 of 0.6. The culture was induced with 0.25 mM IPTG overnight at 16° C. The cells were spun down and the cell pellet was re-suspend in 5 mL of buffer. The resuspension was sonicated for 2 min on ice.

[0172] Second instar SGSB were obtained from a commercial insectary (Benzon Research Inc., Carlisle, Pa.). A 50% v/v ratio of sonicated lysate sample to 20% sucrose was employed in the bioassay. Stretched parafilm was used as a feeding membrane to expose the SGSB to the diet/sample mixture. The plates were incubated at 25° C.:21° C., 16:8 day:night cycle at 65% RH for 5 days.

[0173] Mortality was scored for each sample. The results are set forth in Table 5. A dashed line indicates no mortality was detected. The proteins listed in Table 5 showed 25% mortality or 75% mortality (as indicated) against southern green stinkbug (1 stinkbug out of 4 died). The negative controls (empty vector expressed binding domain and buffer only) both showed no mortality (0 stinkbugs out of 4).

TABLE 5
Summary of Pesticidal Activity against Hemipteran

| | | Tested against |
|---|---|---|
| APG | Seq ID | SGSB |
| APG00001 | 3 | 25% |
| APG00004 | 7 | 25% |
| APG00015 | 25 | 25% |
| APG00017 | 28 | 50% |
| APG00025 | 41 | 25% |
| APG00029 | 49 | 25% |
| APG00040 | 62 | 25% |
| APG00049 | 79 | 25% |
| APG00096 | 126 | 25% |
| APG00103 | 132 | 25% |
| APG00111 | 140 | 25% |
| APG00149 | 172 | 25% |
| APG00161 | 177 | 25% |
| APG00167 | 180 | 25% |
| APG00174 | 185 | 25% |
| APG00191 | 191 | 75% |
| APG00206 | 199 | 25% |

### Example 5

### Transformation of Soybean

[0174] DNA constructs comprising each of SEQ ID NOs: 1-229 or active variants or fragments thereof operably linked to a promoter active in a plant are cloned into transformation vectors and introduced into Agrobacterium as described in PCT application No. PCT/US2015/066702, filed Dec. 18, 2015, herein incorporated by reference in its entirety.

[0175] Four days prior to inoculation, several loops of Agrobacterium are streaked to a fresh plate of YEP* medium supplemented with the appropriate antibiotics** (spectinomycin, chloramphenicol and kanamycin). Bacteria are grown for two days in the dark at 28° C. After two days, several loops of bacteria are transferred to 3 ml of YEP liquid medium with antibiotics in a 125 ml Erlenmeyer flask. Flasks are placed on a rotary shaker at 250 RPM at 28° C. overnight. One day before inoculation, 2-3 ml of the overnight culture were transferred to 125 ml of YEP with antibiotics in a 500 ml Erlenmeyer flask. Flasks are placed on a rotary shaker at 250 RPM at 28° C. overnight.

[0176] Prior to inoculation, the OD of the bacterial culture is checked at OD 620. An OD of 0.8-1.0 indicates that the culture is in log phase. The culture is centrifuged at 4000 RPM for 10 minutes in Oakridge tubes. The supernatant is discarded and the pellet is resuspended in a volume of Soybean Infection Medium (SI) to achieve the desired OD. The cultures are held with periodic mixing until needed for inoculation.

[0177] Two or three days prior to inoculation, soybean seeds are surface sterilized using chlorine gas. In a fume hood, a petri dish with seeds is placed in a bell jar with the lid off. 1.75 ml of 12 N HCl is slowly added to 100 ml of bleach in a 250 ml Erlenmeyer flask inside the bell jar. The lid is immediately placed on top of the bell jar. Seeds are allowed to sterilize for 14-16 hours (overnight). The top is removed from the bell jar and the lid of the petri dish is replaced. The petri dish with the surface sterilized is then opened in a laminar flow for around 30 minutes to disperse any remaining chlorine gas.

[0178] Seeds are imbibed with either sterile DI water or soybean infection medium (SI) for 1-2 days. Twenty to 30 seeds are covered with liquid in a 100×25 mm petri dish and incubated in the dark at 24° C. After imbibition, non-germinating seeds are discarded.

[0179] Cotyledonary explants are processed on a sterile paper plate with sterile filter paper dampened using SI medium employing the methods of U.S. Pat. No. 7,473,822, herein incorporated by reference.

[0180] Typically, 16-20 cotyledons are inoculated per treatment. The SI medium used for holding the explants is discarded and replaced with 25 ml of Agrobacterium culture (OD 620=0.8-20). After all explants are submerged, the inoculation is carried out for 30 minutes with periodic swirling of the dish. After 30 minutes, the Agrobacterium culture is removed.

[0181] Co-cultivation plates are prepared by overlaying one piece of sterile paper onto Soybean Co-cultivation Medium (SCC). Without blotting, the inoculated cotyledons are cultured adaxial side down on the filter paper. Around 20 explants can be cultured on each plate. The plates are sealed with Parafilm and cultured at 24° C. and around 120 μmoles m⁻²s⁻¹ (in a Percival incubator) for 4-5 days.

[0182] After co-cultivation, the cotyledons are washed 3 times in 25 ml of Soybean Wash Medium with 200 mg/l of cefotaxime and timentin. The cotyledons are blotted on sterile filter paper and then transferred to Soybean Shoot Induction Medium (SSI). The nodal end of the explant is depressed slightly into the medium with distal end kept above the surface at about 45 deg. No more than 10 explants are cultured on each plate. The plates are wrapped with Micropore tape and cultured in the Percival at 24° C. and around 120 μmoles m⁻²s⁻¹.

[0183] The explants are transferred to fresh SSI medium after 14 days. Emerging shoots from the shoot apex and cotyledonary node are discarded. Shoot induction is continued for another 14 days under the same conditions.

[0184] After 4 weeks of shoot induction, the cotyledon is separated from the nodal end and a parallel cut is made underneath the area of shoot induction (shoot pad). The area of the parallel cut is placed on Soybean Shoot Elongation Medium (SSE) and the explants cultured in the Percival at 24° C. and around 120 μmoles m⁻²s⁻¹. This step is repeated every two weeks for up to 8 weeks as long as shoots continue to elongate.

[0185] When shoots reach a length of 2-3 cm, they are transferred to Soybean Rooting Medium (SR) in a Plantcon vessel and incubated under the same conditions for 2 weeks or until roots reach a length of around 3-4 cm. After this, plants are transferred to soil.

[0186] Note, all media mentioned for soybean transformation are found in Paz et al. (2010) Agrobacterium-mediated transformation of soybean and recovery of transgenic soybean plants; Plant Transformation Facility of Iowa State University, which is herein incorporated by reference in its entirety. (See, agron-www.agron.iastate.edu/ptf/protocol/Soybean.pdf.)

### Example 6

### Transformation of Maize

[0187] Maize ears are best collected 8-12 days after pollination. Embryos are isolated from the ears, and those embryos 0.8-1.5 mm in size are preferred for use in transformation. Embryos are plated scutellum side-up on a suitable incubation media, such as DN62A5S media (3.98 g/L N6 Salts; 1 mL/L (of 1000× Stock) N6 Vitamins; 800 mg/L L-Asparagine; 100 mg/L Myo-inositol; 1.4 g/L L-Proline; 100 mg/L Casamino acids; 50 g/L sucrose; 1 mL/L (of 1 mg/mL Stock) 2,4-D). However, media and salts other than DN62A5S are suitable and are known in the art. Embryos are incubated overnight at 25° C. in the dark. However, it is not necessary per se to incubate the embryos overnight.

[0188] The resulting explants are transferred to mesh squares (30-40 per plate), transferred onto osmotic media for about 30-45 minutes, and then transferred to a beaming plate (see, for example, PCT Publication No. WO/0138514 and U.S. Pat. No. 5,240,842). DNA constructs designed to express the GRG proteins of the present invention in plant cells are accelerated into plant tissue using an aerosol beam accelerator, using conditions essentially as described in PCT Publication No. WO/0138514. After beaming, embryos are incubated for about 30 min on osmotic media, and placed onto incubation media overnight at 25° C. in the dark. To avoid unduly damaging beamed explants, they are incubated for at least 24 hours prior to transfer to recovery media. Embryos are then spread onto recovery period media, for about 5 days, 25° C. in the dark, and then transferred to a selection media. Explants are incubated in selection media for up to eight weeks, depending on the nature and characteristics of the particular selection utilized. After the selection period, the resulting callus is transferred to embryo maturation media, until the formation of mature somatic embryos is observed. The resulting mature somatic embryos are then placed under low light, and the process of regeneration is initiated by methods known in the art. The resulting shoots are allowed to root on rooting media, and the resulting plants are transferred to nursery pots and propagated as transgenic plants.

### Example 7

### Pesticidal Activity Against Nematodes

### Heterodera Glycine's (Soybean Cyst Nematode) In Vitro Assay

[0189] Soybean Cyst Nematodes are dispensed into a 96 well assay plate with a total volume of 100 uls and 100 J2 per well. The protein of interest as set forth in any one of SEQ ID NOs: 1-229 is dispensed into the wells and held at room temperature for assessment. Finally, the 96 well plate containing the SCN J2 is analyzed for motility. Data is reported as % inhibition as compared to the controls. Hits are defined as greater or equal to 70% inhibition.

Heterodera Glycine's (Soybean Cyst Nematode) on-Plant Assay

[0190] Soybean plants expressing one or more of SEQ ID NOs: 1-229 are generated as described elsewhere herein. A 3-week-old soybean cutting is inoculated with 5000 SCN eggs per plant. This infection is held for 70 days and then harvested for counting of SCN cyst that has developed on the plant. Data is reported as % inhibition as compared to the controls. Hits are defined as greater or equal to 90% inhibition.

Meloidogyne incognita (Root-Knot Nematode) In Vitro Assay

[0191] Root-Knot Nematodes are dispensed into a 96 well assay plate with a total volume of 100 uls and 100 J2 per well. The protein of interest comprising any one of SEQ ID NOs: 1-229 is dispensed into the wells and held at room temperature for assessment. Finally the 96 well plate containing the RKN J2 is analyzed for motility. Data is reported as % inhibition as compared to the controls. Hits are defined as greater or equal to 70% inhibition.

Meloidogyne incognita (Root-Knot Nematode) on-Plant Assay

[0192] Soybean plants expressing one or more of SEQ ID NOs: 1-229 are generated as described elsewhere herein. A 3-week-old soybean is inoculated with 5000 RKN eggs per plant. This infection is held for 70 days and then harvested for counting of RKN eggs that have developed in the plant. Data is reported as % inhibition as compared to the controls. Hits are defined as greater or equal to 90% inhibition.

### Example 8

### Additional Assays for Pesticidal Activity

[0193] The various polypeptides set forth in SEQ ID NOs: 1-229 can be tested to act as a pesticide upon a pest in a number of ways. One such method is to perform a feeding assay. In such a feeding assay, one exposes the pest to a sample containing either compounds to be tested or control samples. Often this is performed by placing the material to be tested, or a suitable dilution of such material, onto a material that the pest will ingest, such as an artificial diet. The material to be tested may be composed of a liquid, solid, or slurry. The material to be tested may be placed upon the surface and then allowed to dry. Alternatively, the material to be tested may be mixed with a molten artificial diet, and then dispensed into the assay chamber. The assay chamber may be, for example, a cup, a dish, or a well of a microtiter plate.

[0194] Assays for sucking pests (for example aphids) may involve separating the test material from the insect by a partition, ideally a portion that can be pierced by the sucking mouth parts of the sucking insect, to allow ingestion of the test material. Often the test material is mixed with a feeding stimulant, such as sucrose, to promote ingestion of the test compound.

[0195] Other types of assays can include microinjection of the test material into the mouth, or gut of the pest, as well as development of transgenic plants, followed by test of the ability of the pest to feed upon the transgenic plant. Plant testing may involve isolation of the plant parts normally consumed, for example, small cages attached to a leaf, or isolation of entire plants in cages containing insects.

[0196] Other methods and approaches to assay pests are known in the art, and can be found, for example in Robertson and Preisler, eds. (1992) Pesticide bioassays with arthropods, CRC, Boca Raton, Fla. Alternatively, assays are commonly described in the journals Arthropod Management Tests and Journal of Economic Entomology or by discussion with members of the Entomological Society of America (ESA). Any one of SEQ ID NOS: 1-229 can be expressed and employed in an assay as set forth in Examples 3 and 4, herein.

[0197] All publications and patent applications mentioned in the specification are indicative of the level of skill of those skilled in the art to which this invention pertains. All publications and patent applications are herein incorporated by reference to the same extent as if each individual publication or patent application was specifically and individually indicated to be incorporated by reference.

[0198] Although the foregoing invention has been described in some detail by way of illustration and example for purposes of clarity of understanding, it will be obvious that certain changes and modifications may be practiced within the scope of the appended claims.

The application's sequence listing, which the Patent Office published only in electronic form, follows.

SEQUENCE LISTING (229 sequences)

SEQ ID NO: 1 - protein, 1163 aa, Bacillus sp.
LSFWSDTMDQIYQPCSFPYNVLAQPINLTDSAAFYSPTILGTDDATILDKILEDIKKYYTKGTFASDFAKTILPLITQHKINWSSILNIAFSFTSSIPFVGTAVSILSPFLQMLFPSDPAAQSRKIMEEILTQTEAMINQQIGKTELDRITQNIVGLGNVLSHHNQTISQIANLDPSKVFNTIEAIADIFIVNIPQLVSLGYIPQTLPLFVQGVNLYFMFLKTTIESADLLKLTEGEITFFKTALQEAIPHYTTEVVQYFNRIPDSSKTTEIRNAMQINCFDFVALWPVFNPDYYPTQTDIEQTRLLFEKSGYGESDGGRVPTPYDDSVGYRSDLELTNIVTRGADRVDFVQEQFANGTTISGGSGLGYQFPDFPSSRNNPVIDIYESSTNGEQYQAIHYKAADGTLGPYRQTTYDLNPPPGQKIYYTALGTHNFMGVGQVGPILSMFIPINLFPENIIGVPDSETGNIPIKGIPFEKGHTEGLRHTREEVNAASAVVLEPGQSITLPITCITTAVYQLRIRYAYTDTSGNKRSLPITISTTIGDLNDTKMLEHTAENPLGVVGNNGTYIFESKPSDVYLSTGNVTVQIINKGRYNLFLDRLDFVPLRSSSSPFDKFSQDFNDMPPNIQKTIWFGPTAQLVNINGYVFAIGDRFASISLQFWNKGKFVKSLPPTPTEPSPLPGSVPIYYMNEPIGDFDTITIIGSVGTVTGHIEGNAFQENASVPTNLDEVTRNIQNLFSFSNPTILNTHITNRMLNEVFIQIKNLPSTTNPTQIRFLREQLNRAKELYRQQNLILNGDFDSLSAWMVTPKVSIIKNIDSSISNILFLPPPTLSPSYALQKIEETTLKENTRYTISGFIKESSDLRLFISRYQMEIDTTLDVPFKDTNEFQYSIDVGTLDIEQNIGIGIGFMITSAIGFARIENVMIKEERPLTTQEIQAIQYKIQKWKNDCQTTQQELETLLEPAVTQINQLYYNADWNSNIYPTITYQDLYNIVLPQTTESDVIQNRISLLQQAVNRAFDLLDSQNLIVNGRFLQELTNWNVQGTVNINTTDYPFNILELTDWDANVSQSITLPFFNPNQPYKLRVYAQGQGSITVTSGMLTTTLTFDSSDFTLQESDTIYFNQPTVEITIQSEGAKFLIQSIELFPNTTFTSLPNTSSNN

SEQ ID NO: 2 - protein, 1156 aa, Artificial sequence
  Variant of native sequence
MDQIYQPCSFPYNVLAQPINLTDSAAFYSPTILGTDDATILDKILEDIKKYYTKGTFASDFAKTILPLITQHKINWSSILNIAFSFTSSIPFVGTAVSILSPFLQMLFPSDPAAQSRKIMEEILTQTEAMINQQIGKTELDRITQNIVGLGNVLSHHNQTISQIANLDPSKVFNTIEAIADIFIVNIPQLVSLGYIPQTLPLFVQGVNLYFMFLKTTIESADLLKLTEGEITFFKTALQEAIPHYTTEVVQYFNRIPDSSKTTEIRNAMQINCFDFVALWPVFNPDYYPTQTDIEQTRLLFEKSGYGESDGGRVPTPYDDSVGYRSDLELTNIVTRGADRVDFVQEQFANGTTISGGSGLGYQFPDFPSSRNNPVIDIYESSTNGEQYQAIHYKAADGTLGPYRQTTYDLNPPPGQKIYYTALGTHNFMGVGQVGPILSMFIPINLFPENIIGVPDSETGNIPIKGIPFEKGHTEGLRHTREEVNAASAVVLEPGQSITLPITCITTAVYQLRIRYAYTDTSGNKRSLPITISTTIGDLNDTKMLEHTAENPLGVVGNNGTYIFESKPSDVYLSTGNVTVQIINKGRYNLFLDRLDFVPLRSSSSPFDKFSQDFNDMPPNIQKTIWFGPTAQLVNINGYVFAIGDRFASISLQFWNKGKFVKSLPPTPTEPSPLPGSVPIYYMNEPIGDFDTITIIGSVGTVTGHIEGNAFQENASVPTNLDEVTRNIQNLFSFSNPTILNTHITNRMLNEVFIQIKNLPSTTNPTQIRFLREQLNRAKELYRQQNLILNGDFDSLSAWMVTPKVSIIKNIDSSISNILFLPPPTLSPSYALQKIEETTLKENTRYTISGFIKESSDLRLFISRYQMEIDTTLDVPFKDTNEFQYSIDVGTLDIEQNIGIGIGFMITSAIGFARIENVMIKEERPLTTQEIQAIQYKIQKWKNDCQTTQQELETLLEPAVTQINQLYYNADWNSNIYPTITYQDLYNIVLPQTTESDVIQNRISLLQQAVNRAFDLLDSQNLIVNGRFLQELTNWNVQGTVNINTTDYPFNILELTDWDANVSQSITLPFFNPNQPYKLRVYAQGQGSITVTSGMLTTTLTFDSSDFTLQESDTIYFNQPTVEITIQSEGAKFLIQSIELFPNTTFTSLPNTSSNN

SEQ ID NO: 3 - protein, 600 aa, Artificial sequence
  Variant of native sequence
MDQIYQPCSFPYNVLAQPINLTDSAAFYSPTILGTDDATILDKILEDIKKYYTKGTFASDFAKTILPLITQHKINWSSILNIAFSFTSSIPFVGTAVSILSPFLQMLFPSDPAAQSRKIMEEILTQTEAMINQQIGKTELDRITQNIVGLGNVLSHHNQTISQIANLDPSKVFNTIEAIADIFIVNIPQLVSLGYIPQTLPLFVQGVNLYFMFLKTTIESADLLKLTEGEITFFKTALQEAIPHYTTEVVQYFNRIPDSSKTTEIRNAMQINCFDFVALWPVFNPDYYPTQTDIEQTRLLFEKSGYGESDGGRVPTPYDDSVGYRSDLELTNIVTRGADRVDFVQEQFANGTTISGGSGLGYQFPDFPSSRNNPVIDIYESSTNGEQYQAIHYKAADGTLGPYRQTTYDLNPPPGQKIYYTALGTHNFMGVGQVGPILSMFIPINLFPENIIGVPDSETGNIPIKGIPFEKGHTEGLRHTREEVNAASAVVLEPGQSITLPITCITTAVYQLRIRYAYTDTSGNKRSLPITISTTIGDLNDTKMLEHTAENPLGVVGNNGTYIFESKPSDVYLSTGNVTVQIINKGRYNLFLDRLDFVPL

SEQ ID NO: 4 - protein, 649 aa, Bacillus sp.
MGGERMNNKSCKKEIVNTKFPMNSSKRKNGDFTSFIANNKNFMPLDTNQKGWLVNCDKNTLIKIEPTNAAAAVSNSILAVAAILSISFPVFGSGVLLLGTLTAIFWQSSSDDQSTWKDFISMTEEAIQHSITASVQANAMAHLRGLQVNFNTFMNTFRTWELDKADPSALSKLLSEFNNLNGAFKSAMPHFSPSMLAEDRISLLPIYAYAAFLHLTLLSYATVYGKSWGLSDRVIRDYEDEQSNALIEYTDYCTTVYTLGLLRLTVKNVDWNKINTYRRNMTICVLDIVAMFQYLDKRKYPMKVKPELTREIYSDALSFDGSLNEYYNFGVAEEKLTRQPHLLTWIVALYFNQRNTTEPNNFFTSHRHAIETTNGSREFSPVFGNENPDDLALNTGTISLPFEFIYSLTTLNFQSANPTEYNNINEIRFSISNGRTTRQGNIKPAGPITRNLITNTWFLPPRDNSRVLGPTNYSHYLSFIKAFNSSNVPRSIVYSFAWNHYSVNDLNQIYLDHITTVPAVKANFLGNTSRVERGPGHTGGDIVHLRDRMEFRCYSPNRKSYFIRLRYAANGANLVGITIPGILGQSMVLNQTFSGNNYSALKYSEFGYLQVPNEVVLPTDQYFNIILQRTNPNAGEILIIDKIEFLPIN

SEQ ID NO: 5 - protein, 644 aa, Artificial sequence
  Variant of native sequence
MNNKSCKKEIVNTKFPMNSSKRKNGDFTSFIANNKNFMPLDTNQKGWLVNCDKNTLIKIEPTNAAAAVSNSILAVAAILSISFPVFGSGVLLLGTLTAIFWQSSSDDQSTWKDFISMTEEAIQHSITASVQANAMAHLRGLQVNFNTFMNTFRTWELDKADPSALSKLLSEFNNLNGAFKSAMPHFSPSMLAEDRISLLPIYAYAAFLHLTLLSYATVYGKSWGLSDRVIRDYEDEQSNALIEYTDYCTTVYTLGLLRLTVKNVDWNKINTYRRNMTICVLDIVAMFQYLDKRKYPMKVKPELTREIYSDALSFDGSLNEYYNFGVAEEKLTRQPHLLTWIVALYFNQRNTTEPNNFFTSHRHAIETTNGSREFSPVFGNENPDDLALNTGTISLPFEFIYSLTTLNFQSANPTEYNNINEIRFSISNGRTTRQGNIKPAGPITRNLITNTWFLPPRDNSRVLGPTNYSHYLSFIKAFNSSNVPRSIVYSFAWNHYSVNDLNQIYLDHITTVPAVKANFLGNTSRVERGPGHTGGDIVHLRDRMEFRCYSPNRKSYFIRLRYAANGANLVGITIPGILGQSMVLNQTFSGNNYSALKYSEFGYLQVPNEVVLPTDQYFNIILQRTNPNAGEILIIDKIEFLPIN

SEQ ID NO: 6 - protein, 648 aa, Artificial sequence
  Variant of native sequence
MGGERMNNKSCKKEIVNTKFPMNSSKRKNGDFTSFIANNKNFMPLDTNQKGWLVNCDKNTLIKIEPTNAAAAVSNSILAVAAILSISFPVFGSGVLLLGTLTAIFWQSSSDDQSTWKDFISMTEEAIQHSITASVQANAMAHLRGLQVNFNTFMNTFRTWELDKADPSALSKLLSEFNNLNGAFKSAMPHFSPSMLAEDRISLLPIYAYAAFLHLTLLSYATVYGKSWGLSDRVIRDYEDEQSNALIEYTDYCTTVYTLGLLRLTVKNVDWNKINTYRRNMTICVLDIVAMFQYLDKRKYPMKVKPELTREIYSDALSFDGSLNEYYNFGVAEEKLTRQPHLLTWIVALYFNQRNTTEPNNFFTSHRHAIETTNGSREFSPVFGNENPDDLALNTGTISLPFEFIYSLTTLNFQSANPTEYNNINEIRFSISNGRTTRQGNIKPAGPITRNLITNTWFLPPRDNSRVLGPTNYSHYLSFIKAFNSSNVPRSIVYSFAWNHYSVNDLNQIYLDHITTVPAVKANFLGNTSRVERGPGHTGGDIVHLRDRMEFRCYSPNRKSYFIRLRYAANGANLVGITIPGILGQSMVLNQTFSGNNYSALKYSEFGYLQVPNEVVLPTDQYFNIILQRTNPNAGEILIIDKIEFLPI

SEQ ID NO: 7 - protein, 658 aa, Bacillus sp.
MNSNSKNEHNVIGVSSDTSLSTNAVESSLTNAPTTELQNMNYQDYLRMFEGCDNEFLENSERFVSTQGAVKIGISIVGKLLGSLGVPFSGQITNLYSFIIDQLWPSGKSQWEIFMEQVEELINQKIAEYARNKALAELEGLGANFQLYLEALEEWKETPHNVRALRDVRNRFEILDSLFTQYMPSFRISGYEVPLLTVYAQAANLHLLLLRDASIFGEEWGFSATTINNYYKRQMSVTAEYTIHCVEWYNTGLDRLNGSTAKQWVTYNRFRREMTLTVLDVVTLFPSYDVRTYPIGTTVQLTRELYTDPIGSVGQYSWVDPAPSFSEIENAVIRKPHEFDFISTLRIYTGLSRWDSSHYFYFWKGHEIHYKNSASRAPVVKKYGSTEKPVSIEGVNFDGQDVYKIKSIGGVLFAWTSQYYGVPKVDIYMVDRNNSNRRREFTYNPGYEGIGGSTFDSESELPPETLDNPNYQDYSHRLCYVGMIINSNSSKNPYVPIFSWTHRSADFKNTIYANKIAQIPISKVPNVIGGTFIHNLYTGGPILKLSGITNKKISFRVSTDLEGAGKEYRIRIKYASNQAGKFTITSKSSENPKTYETSIAYEKSMNTSNSLAYGDFSYAESTPIRLGNTGSSKTFDISLTKETGTDIYIDKIEFIPVM

SEQ ID NO: 8 - protein, 657 aa, Artificial sequence
  Variant of native sequence
MNSNSKNEHNVIGVSSDTSLSTNAVESSLTNAPTTELQNMNYQDYLRMFEGCDNEFLENSERFVSTQGAVKIGISIVGKLLGSLGVPFSGQITNLYSFIIDQLWPSGKSQWEIFMEQVEELINQKIAEYARNKALAELEGLGANFQLYLEALEEWKETPHNVRALRDVRNRFEILDSLFTQYMPSFRISGYEVPLLTVYAQAANLHLLLLRDASIFGEEWGFSATTINNYYKRQMSVTAEYTIHCVEWYNTGLDRLNGSTAKQWVTYNRFRREMTLTVLDVVTLFPSYDVRTYPIGTTVQLTRELYTDPIGSVGQYSWVDPAPSFSEIENAVIRKPHEFDFISTLRIYTGLSRWDSSHYFYFWKGHEIHYKNSASRAPVVKKYGSTEKPVSIEGVNFDGQDVYKIKSIGGVLFAWTSQYYGVPKVDIYMVDRNNSNRRREFTYNPGYEGIGGSTFDSESELPPETLDNPNYQDYSHRLCYVGMIINSNSSKNPYVPIFSWTHRSADFKNTIYANKIAQIPISKVPNVIGGTFIHNLYTGGPILKLSGITNKKISFRVSTDLEGAGKEYRIRIKYASNQAGKFTITSKSSENPKTYETSIAYEKSMNTSNSLAYGDFSYAESTPIRLGNTGSSKTFDISLTKETGTDIYIDKIEFIPV

SEQ ID NO: 9 - protein, 305 aa, Bacillus sp
MERRLLFMAIFDLDAYLVALAKKYYPDIFSQFISRVDTSFLAVKNAESYGFEIKNSKPQGTMFIGESVLKNDTNETQTIHSDSFTKTITDSVTLSVTTGITTGIDISIGGKIFGMGVETSMSFEVSTSTTNEQTSEESVAYTVPSQPVVVPAKKTYYVHTSLQRSQLEGSIRLRADLSGPFSVYMKMNGTEMPLGSHSLYDFIKEHQSLHPLPSGISLNHNNKSVHFEGIAEYIFGTGTKFYVTITDTPSSQGTQEHKAYDAKTGLGTYEIDLDGKKLGFALNDLKDKLEPEAFEKLKELQNEIV

SEQ ID NO: 10 - protein, 285 aa, Artificial sequence
  Variant of native sequence
MKKYYPDIFSQFISRVDTSFLAVKNAESYGFEIKNSKPQGTMFIGESVLKNDTNETQTIHSDSFTKTITDSVTLSVTTGITTGIDISIGGKIFGMGVETSMSFEVSTSTTNEQTSEESVAYTVPSQPVVVPAKKTYYVHTSLQRSQLEGSIRLRADLSGPFSVYMKMNGTEMPLGSHSLYDFIKEHQSLHPLPSGISLNHNNKSVHFEGIAEYIFGTGTKFYVTITDTPSSQGTQEHKAYDAKTGLGTYEIDLDGKKLGFALNDLKDKLEPEAFEKLKELQNEIV

SEQ ID NO: 11 - protein, 1287 aa, Bacillus sp.
MRYDTYKLKGGQFMNQYYGNNGREVLDLKMGRSTYPYAQNSRSELQSMNYKEWLTMCEGNDGLSPSPFVAPQDIVSVTLDITGTLLGLIPVVGGPLKAGVSILNSIIKLLWPKPTPEEPTIDPNEIWIQLMEKVEQLIDQKISQEAFNAAIGRLNGLKRALDLYQVAFEIWVQDQTDPELQETLRIEFLNARSEMVSTIETFRYKGQEVNLLTVFAQAADLHLLLLREGVLYGLQWGFDERTVQSFYSNSQGEGLKDLLPQYTDYCTYWYIEGLKITYTLKPDLSNTERYPWSADKPDWNQRVLEELEGWNLFNDWRRDVTIMALDLVALWPTYDLYYYNNLEYGVTTELTRPVYSQASGTSWGSILSRDQYEQGIVRSPHLVTWLNSIDFHLNPGPFNASNSYKHYTGLKMKYYYSGLDYTIFESPLIGTTSYSKKTINVEAKYNNDIFQADVKHNDAVYTMDFFKNNGNIETVGYPRDPNYSTLSWPPETTISNYDHQMTWISGPVDYNTIPAFGIEWVHNSSSPFNYIAESTIENPIITQMPAVKAETLIGNASVIKGPGSTGGDLVSIPPGAYIIIRVTGTTQPAYQVRLRYVSQGAGQLWMSRDLYQNGSWGNDYATSFDVPATKSDGSLTYNSFGYVVAPYPLMYPYNTDWRMTFYNGGQTTIIMDKIEFIPIQGNVAEYEAQQNLEKAWKAVNALFTNDTKNALRLDITDYDVDQAANKVDCMSDDMFPKEKMILLDQVKQAKRLSQARNLLNVGDFESPDWSDDNGWKVSNNVTVQSDYPISRGRYLNMPSARIIEFSDTLYPTYAYQKIAESQLKPYTRYLVRGFVENSKQLELLVTRYGKDIYAEMNVPSYQVINNQGVRMPNSCGTKQVSSYNIPPTMPSDPCQNVYATNTSSLMIPSTNGLCEDKQHFLFHVDVGELDMRANPGIEFGLKISSPEGMAKLDNLEVIEANPLTGEALARVKKREQKWRKEMKQKCALTEKAETSATQAVDSLFTNTQKVKLKSTTNMQSIENAEAKVDAIPYIHHPEFKDLSGMNTMIFQQLQSTIMTAMNLYGRRNVIRNGDFSGGLSNWSVTDGVDVEVKDGKFPVLVISQWDANVSQDVCVQPEHGYVLRVTARKEGAGKGYVTISDCTAENTETITFTSNERFMTERAPVTVPTSAVCDITDSYGTGTSPYNQNTMGNDYAESLDRISCSCGNGSEPCTCGSSNMSNNLSGRNGTKSYTSTQRIPNRDASLSSAYITKTIEMFPETNHIRIEIGETQGTFLVESIELVCMED

SEQ ID NO: 12 - protein, 1274 aa, Artificial sequence
  Variant of native sequence
MNQYYGNNGREVLDLKMGRSTYPYAQNSRSELQSMNYKEWLTMCEGNDGLSPSPFVAPQDIVSVTLDITGTLLGLIPVVGGPLKAGVSILNSIIKLLWPKPTPEEPTIDPNEIWIQLMEKVEQLIDQKISQEAFNAAIGRLNGLKRALDLYQVAFEIWVQDQTDPELQETLRIEFLNARSEMVSTIETFRYKGQEVNLLTVFAQAADLHLLLLREGVLYGLQWGFDERTVQSFYSNSQGEGLKDLLPQYTDYCTYWYIEGLKITYTLKPDLSNTERYPWSADKPDWNQRVLEELEGWNLFNDWRRDVTIMALDLVALWPTYDLYYYNNLEYGVTTELTRPVYSQASGTSWGSILSRDQYEQGIVRSPHLVTWLNSIDFHLNPGPFNASNSYKHYTGLKMKYYYSGLDYTIFESPLIGTTSYSKKTINVEAKYNNDIFQADVKHNDAVYTMDFFKNNGNIETVGYPRDPNYSTLSWPPETTISNYDHQMTWISGPVDYNTIPAFGIEWVHNSSSPFNYIAESTIENPIITQMPAVKAETLIGNASVIKGPGSTGGDLVSIPPGAYIIIRVTGTTQPAYQVRLRYVSQGAGQLWMSRDLYQNGSWGNDYATSFDVPATKSDGSLTYNSFGYVVAPYPLMYPYNTDWRMTFYNGGQTTIIMDKIEFIPIQGNVAEYEAQQNLEKAWKAVNALFTNDTKNALRLDITDYDVDQAANKVDCMSDDMFPKEKMILLDQVKQAKRLSQARNLLNVGDFESPDWSDDNGWKVSNNVTVQSDYPISRGRYLNMPSARIIEFSDTLYPTYAYQKIAESQLKPYTRYLVRGFVENSKQLELLVTRYGKDIYAEMNVPSYQVINNQGVRMPNSCGTKQVSSYNIPPTMPSDPCQNVYATNTSSLMIPSTNGLCEDKQHFLFHVDVGELDMRANPGIEFGLKISSPEGMAKLDNLEVIEANPLTGEALARVKKREQKWRKEMKQKCALTEKAETSATQAVDSLFTNTQKVKLKSTTNMQSIENAEAKVDAIPYIHHPEFKDLSGMNTMIFQQLQSTIMTAMNLYGRRNVIRNGDFSGGLSNWSVTDGVDVEVKDGKFPVLVISQWDANVSQDVCVQPEHGYVLRVTARKEGAGKGYVTISDCTAENTETITFTSNERFMTERAPVTVPTSAVCDITDSYGTGTSPYNQNTMGNDYAESLDRISCSCGNGSEPCTCGSSNMSNNLSGRNGTKSYTSTQRIPNRDASLSSAYITKTIEMFPETNHIRIEIGETQGTFLVESIELVCMED

SEQ ID NO: 13 - protein, 666 aa, Artificial sequence
  Variant of native sequence
MNQYYGNNGREVLDLKMGRSTYPYAQNSRSELQSMNYKEWLTMCEGNDGLSPSPFVAPQDIVSVTLDITGTLLGLIPVVGGPLKAGVSILNSIIKLLWPKPTPEEPTIDPNEIWIQLMEKVEQLIDQKISQEAFNAAIGRLNGLKRALDLYQVAFEIWVQDQTDPELQETLRIEFLNARSEMVSTIETFRYKGQEVNLLTVFAQAADLHLLLLREGVLYGLQWGFDERTVQSFYSNSQGEGLKDLLPQYTDYCTYWYIEGLKITYTLKPDLSNTERYPWSADKPDWNQRVLEELEGWNLFNDWRRDVTIMALDLVALWPTYDLYYYNNLEYGVTTELTRPVYSQASGTSWGSILSRDQYEQGIVRSPHLVTWLNSIDFHLNPGPFNASNSYKHYTGLKMKYYYSGLDYTIFESPLIGTTSYSKKTINVEAKYNNDIFQADVKHNDAVYTMDFFKNNGNIETVGYPRDPNYSTLSWPPETTISNYDHQMTWISGPVDYNTIPAFGIEWVHNSSSPFNYIAESTIENPIITQMPAVKAETLIGNASVIKGPGSTGGDLVSIPPGAYIIIRVTGTTQPAYQVRLRYVSQGAGQLWMSRDLYQNGSWGNDYATSFDVPATKSDGSLTYNSFGYVVAPYPLMYPYNTDWRMTFYNGGQTTIIMDKIEFIPI

SEQ ID NO: 14 - protein, 679 aa, Artificial sequence
  Variant of native sequence
MRYDTYKLKGGQFMNQYYGNNGREVLDLKMGRSTYPYAQNSRSELQSMNYKEWLTMCEGNDGLSPSPFVAPQDIVSVTLDITGTLLGLIPVVGGPLKAGVSILNSIIKLLWPKPTPEEPTIDPNEIWIQLMEKVEQLIDQKISQEAFNAAIGRLNGLKRALDLYQVAFEIWVQDQTDPELQETLRIEFLNARSEMVSTIETFRYKGQEVNLLTVFAQAADLHLLLLREGVLYGLQWGFDERTVQSFYSNSQGEGLKDLLPQYTDYCTYWYIEGLKITYTLKPDLSNTERYPWSADKPDWNQRVLEELEGWNLFNDWRRDVTIMALDLVALWPTYDLYYYNNLEYGVTTELTRPVYSQASGTSWGSILSRDQYEQGIVRSPHLVTWLNSIDFHLNPGPFNASNSYKHYTGLKMKYYYSGLDYTIFESPLIGTTSYSKKTINVEAKYNNDIFQADVKHNDAVYTMDFFKNNGNIETVGYPRDPNYSTLSWPPETTISNYDHQMTWISGPVDYNTIPAFGIEWVHNSSSPFNYIAESTIENPIITQMPAVKAETLIGNASVIKGPGSTGGDLVSIPPGAYIIIRVTGTTQPAYQVRLRYVSQGAGQLWMSRDLYQNGSWGNDYATSFDVPATKSDGSLTYNSFGYVVAPYPLMYPYNTDWRMTFYNGGQTTIIMDKIEFIPI

SEQ ID NO: 15 - protein, 415 aa, Bacillus sp.
MIHIYKRSGEKVYENNKMKYWKKRLTKVIPICALSTGFLVSVGNPAYAERSNTQKNNSSENSMYKLSIKTASTDVYSQLAWDTVTALQSAIKNNPHVFGYITSDSFQPGVHHSITPIDQITYEFDKNLVNDFYNHGHPLLGMENKKLEFSGVNGNINITGVQNGDITNLANLELLNYHNDGDVEQTYNTVEKQYSTTDSMTYTNQEGVKLGITESIKATAGVPLVAEGEETTTLSAEFIYNHTSSNTSSNTTTYTFKSQPVKCVPHGTTKFIQSVKQAKFSGTYTGPVRVIEPKDIKVQVRNADNYETGFLTASPGEENHFLYNAFKYSTQPMPSYMELDDATKSVIIKEPGETMTFTGQAGFQENANLEFIPDDKSKPSITIPYSIYIKEQQKGNINKYIDELMKKRFNLNKTF

SEQ ID NO: 16 - protein, 368 aa, Artificial sequence
  Variant of native sequence
MERSNTQKNNSSENSMYKLSIKTASTDVYSQLAWDTVTALQSAIKNNPHVFGYITSDSFQPGVHHSITPIDQITYEFDKNLVNDFYNHGHPLLGMENKKLEFSGVNGNINITGVQNGDITNLANLELLNYHNDGDVEQTYNTVEKQYSTTDSMTYTNQEGVKLGITESIKATAGVPLVAEGEETTTLSAEFIYNHTSSNTSSNTTTYTFKSQPVKCVPHGTTKFIQSVKQAKFSGTYTGPVRVIEPKDIKVQVRNADNYETGFLTASPGEENHFLYNAFKYSTQPMPSYMELDDATKSVIIKEPGETMTFTGQAGFQENANLEFIPDDKSKPSITIPYSIYIKEQQKGNINKYIDELMKKRFNLNKTF

SEQ ID NO: 17 - protein, 373 aa, Bacillus sp.
VAKSMTFKEGTKYMFKNKNSRKYLDIAGNRTGNNANVQQYEYLEKADSERFFLHKLDDDYYAIINLNSGKVIDISGNETGNNANIQQYEWLGDASSQYWKFIPETEGYYVIKSKLSGKVLDISGNRTDNNANVQQYEYLKKADSERFAVEEAGSVPRPSIDKKTLPLVPQYRTINDQLPEETEHVVTASTIVPAIAVKDPHYGGDTAKQIKENPYYMVVKKQWWKKQQSYVLAPGETYKHTVTTGIKVIDQETATKTVSWSIGADMGLDFKGFSAGMSSQYSEQLETTISHTTEQLKEEIMDHEIRNTTTDNMAYSRYILVTEYSVRRQDGSTVNSSWTMTDKNNAHAVYFPKTIGNLLNESTKQLSKTENVK

SEQ ID NO: 18 - protein, 369 aa, Artificial sequence
  Variant of native sequence
MTFKEGTKYMFKNKNSRKYLDIAGNRTGNNANVQQYEYLEKADSERFFLHKLDDDYYAIINLNSGKVIDISGNETGNNANIQQYEWLGDASSQYWKFIPETEGYYVIKSKLSGKVLDISGNRTDNNANVQQYEYLKKADSERFAVEEAGSVPRPSIDKKTLPLVPQYRTINDQLPEETEHVVTASTIVPAIAVKDPHYGGDTAKQIKENPYYMVVKKQWWKKQQSYVLAPGETYKHTVTTGIKVIDQETATKTVSWSIGADMGLDFKGFSAGMSSQYSEQLETTISHTTEQLKEEIMDHEIRNTTTDNMAYSRYILVTEYSVRRQDGSTVNSSWTMTDKNNAHAVYFPKTIGNLLNESTKQLSKTENVK

SEQ ID NO: 19 - protein, 483 aa, Bacillus sp.
VMNMSSNTMVPYNVLSGVDMPHISGTKWNKEMFINALDNASSLLTLIEKGINDGDDVLGLLSFIGLTALEAIPVVGGVLSSLVSMLFFPTKSSIDFKKIWEHLEKAINQIVDKKIEEALMSLLMQEIAGLANVLKEYRDAYDLYYGEKVFDIPDKLTPEEYLVQVFTSANLLFIQRISTFQNPKYDVLFLPFFVHVAEMHILLIRDAAIHGLEWGMAEEIHEKFKRNLKEIIDEYTSYLLNTYKKGLKEVSERELNDKDFPTTNNKYHYINTVRWNVINQYKRGMTLTVFDFAYKWKYYQEIYQNNIELNPFRTIYSDIAGSVYPYEKATNEIDTIIKDHNLKYRGIFKRLQVNHAERIDSIQSSYIQNNEIIDSERTGGTGGRESVLDIESPVKNPLIQVNMWSELVPISLGFKFYNEKEKNIGGGSWWPNPHKFGAYQYVGNKVSSIMGFGKNATGGFNSLDAMVVGLYETIIHLKIDLLV

SEQ ID NO: 20 - protein, 480 aa, Artificial sequence
  Variant of native sequence
MSSNTMVPYNVLSGVDMPHISGTKWNKEMFINALDNASSLLTLIEKGINDGDDVLGLLSFIGLTALEAIPVVGGVLSSLVSMLFFPTKSSIDFKKIWEHLEKAINQIVDKKIEEALMSLLMQEIAGLANVLKEYRDAYDLYYGEKVFDIPDKLTPEEYLVQVFTSANLLFIQRISTFQNPKYDVLFLPFFVHVAEMHILLIRDAAIHGLEWGMAEEIHEKFKRNLKEIIDEYTSYLLNTYKKGLKEVSERELNDKDFPTTNNKYHYINTVRWNVINQYKRGMTLTVFDFAYKWKYYQEIYQNNIELNPFRTIYSDIAGSVYPYEKATNEIDTIIKDHNLKYRGIFKRLQVNHAERIDSIQSSYIQNNEIIDSERTGGTGGRESVLDIESPVKNPLIQVNMWSELVPISLGFKFYNEKEKNIGGGSWWPNPHKFGAYQYVGNKVSSIMGFGKNATGGFNSLDAMVVGLYETIIHLKIDLLV

SEQ ID NO: 21 - protein, 271 aa, Bacillus sp.
MIDEPMFGDGVLQFENYSNNLNQDSYVTYQIHTETAGTYELHAVIGAEKQKDKVVLKVSINGNHSENITTDSFDNGDIWDGMSLNDGFVYKRVLIGSFQFKKGLNNITIYNGVLQTSASIKIWNLAALELTIPDNTEWKFQNGDFSKGLKGWTVEEGSPSARNQYLDMHQNSKVSQTIKVNPNTTYELSYDSITPSSNNFGGYGTLYLDFLSMDGSKQSGVAHPIEQQGNSWARKTYKFTTPSDIEKLKLTIANEASNQGFNIDNIAVTEG

SEQ ID NO: 22 - protein, 303 aa, Bacillus sp.
VNKKIVTKSIVAMSTIACLSSSLTILSPSIVRAAEVQKSSLVETQTQKSQNAIKDVYADIDNMLASIPVNPNLPGDKWKRTNLLFGNEFSVSGINIKESNVTNIEPIFLGSNVFENDTNLDQTYSTSSFSEAITNTTTTTTQHGFKESTAGKVKVKIPFISEAEITQTLEYNFSNTNANATSTTRTITAPSQSVKVPANKIYKTEVYFEKKKTSGKVEMYADVLTGAVSNGTLLSIGDALNYAKNKYEIINAPSNPDMVRTKGDGTFTIEHGTNLVVKTYDITSKSRSARSTNLVDTKIIPLN

SEQ ID NO: 23 - protein, 271 aa, Artificial squence
  Variant of native sequence
MAEVQKSSLVETQTQKSQNAIKDVYADIDNMLASIPVNPNLPGDKWKRTNLLFGNEFSVSGINIKESNVTNIEPIFLGSNVFENDTNLDQTYSTSSFSEAITNTTTTTTQHGFKESTAGKVKVKIPFISEAEITQTLEYNFSNTNANATSTTRTITAPSQSVKVPANKIYKTEVYFEKKKTSGKVEMYADVLTGAVSNGTLLSIGDALNYAKNKYEIINAPSNPDMVRTKGDGTFTIEHGTNLVVKTYDITSKSRSARSTNLVDTKIIPLN

SEQ ID NO: 24 - protein, 267 aa, Bacillus sp.
MSANVIDIIDLFTRYANTWSEQRGGGNSRVSLILPGFEQLAFSNFTHNTKYHPPTEQMIPDAKLDSHTYTNEGTEPIHINIELSGELQKLVELKATEGVSEAGKRLLGIDLSNEQPPFLSTVPLPLGGDILSFSDMQPWGVKHPYTIEPGYKLKATLMVKQKKIHRLFEVQRTLSRYIGIYTSKPIRQHHLSLHHVSRIFKNHPIPNVEVNGRNVTATDKGTLQYQYGFEPYIHIHKQRINNPRVTEEFNIYNPQTSPPHVVYDQLL

SEQ ID NO: 25 - protein, 270 aa, Bacillus sp.
MNIDALNKNEIELSNANPNVCGNFLHITLNLPVEEEKNFTEIFQVEPQYLAQALRLANAFQGAIDPSDLNFNFERALNIANNIPNSAIVKTMNQNVVQQTVQISVMIDQLKELIRTVLGFAISSPNFWSAVEAAVTSTFTNLNTQEDSAWIFWKSESSSNTTYYYNILFSIQNAETGGVMAVLPIAFEISVNLEKKKVLFLTIRDSARYEVRVKAITLAQALDRNQRNSTDIFNMHKNNPYQAIENKVFNEEMINQLMHKPVSNSGIILP

SEQ ID NO: 26 - protein, 314 aa, Bacillus sp.
MKKQTPRGHTRKGGFSMAIINLNNEIVTFAQNWVANQGPGYSYAGQFGYAATGTDPTVPPFTVSNIVATPATTVVNFAPNSFIFASQQTVVNDGPTQVTKTVIFNQGITNTNSTSTTNGVVTNYNITSKTTLKLAFGVKQANSISEEIDVTFGQTYNYSTTESNTLSEVQNWSDSISVPIPPNTTAVVNYYVLGGNYSIDTYLTCEFNGTIWFMVNYPNGQQQKVYMPLYNVVTANGLTGYYPPTNGQFSVTDIDEPIYFGGNGTINGAQGVASTTTITTTQGGQQTTTSPTLLTTTNSDGTVTGSAVPIPVID

SEQ ID NO: 27 - protein, 298 aa, Artificial sequence
  Variant of native sequence
MAIINLNNEIVTFAQNWVANQGPGYSYAGQFGYAATGTDPTVPPFTVSNIVATPATTVVNFAPNSFIFASQQTVVNDGPTQVTKTVIFNQGITNTNSTSTTNGVVTNYNITSKTTLKLAFGVKQANSISEEIDVTFGQTYNYSTTESNTLSEVQNWSDSISVPIPPNTTAVVNYYVLGGNYSIDTYLTCEFNGTIWFMVNYPNGQQQKVYMPLYNVVTANGLTGYYPPTNGQFSVTDIDEPIYFGGNGTINGAQGVASTTTITTTQGGQQTTTSPTLLTTTNSDGTVTGSAVPIPVID

SEQ ID NO: 28 - protein, 205 aa, Bacillus sp.
MNRGTISDKKKSGYSEEEYYLKLISDVKPEYTVQTLNLMDKFKFIVNPMTKELDTSKILQIANEHPGLAIVSTLNQQFTSNQKMLIKNLVDSSREFVFSAIGGSYLDKGIKKTCINWIENVVVNLNSQIEHPWISFYTEAKDKTSYRYNILFIFQRASFLVITPISFEITILANKDTVLDLKLTNKAEYHVSIKLIQVIQSLNPC

SEQ ID NO: 29 - protein, 314 aa, Bacillus sp.
MKTLFKIKKTFITKLGIILGISSTMFFGNNVMAAQAANIIDVDAQMDKISDFYFENELKWKDVADFPGAYHYIRLDSKKTNMDLDLKTSNLKNLTYSDLNPEYVGENEFDNTNGITEQTFTTAWYSHQVTNSASTSVTEGFKIGGKTTLFKLPILLTGGIDITAEFNSATSKTNTVTDTKTLTASPQNIKVPAGKKYLVKVNMAKKTFNGDIDFRANGQNVKSTLNTLATYYGPGFPRPDKYPSLTFTTADIWEKLSANPQNQIKGVNFDSNKNLILNGKAHINGIFGSTLSVSIYDITASKKSPKLIQQKNMG

SEQ ID NO: 30 - protein, 279 aa, Artificial sequence
  Variant of native sequence
MANIIDVDAQMDKISDFYFENELKWKDVADFPGAYHYIRLDSKKTNMDLDLKTSNLKNLTYSDLNPEYVGENEFDNTNGITEQTFTTAWYSHQVTNSASTSVTEGFKIGGKTTLFKLPILLTGGIDITAEFNSATSKTNTVTDTKTLTASPQNIKVPAGKKYLVKVNMAKKTFNGDIDFRANGQNVKSTLNTLATYYGPGFPRPDKYPSLTFTTADIWEKLSANPQNQIKGVNFDSNKNLILNGKAHINGIFGSTLSVSIYDITASKKSPKLIQQKNMG

SEQ ID NO: 31 - protein, 264 aa, Bacillus sp.
MMKKIITSLMLISTVTLYLGTAKEVNAAQTITNIDTNLNQIGEYYYQNNLAGTTMDRMYQLDKKPQSVSSRANLDFDPNSNNLKLKQSVSNLIYVGDNEFDNTTDTDQSYVTTNYSKAVTQTVSTTTIKGFNINGQGLEFKLPLFIGSNKITAAFNSGTTKTNTETTTETITSGSQPVKVPAHKKYRVITSLEEVAFNGTFDYKANGTNLYNDITAKGLWIDRYGTPYRKTYNFHESVGSEWNSLNSSQKASIKEIEIILVIIV

SEQ ID NO: 32 - protein, 238 aa, Artificial sequence
  Variant of native sequence
MAQTITNIDTNLNQIGEYYYQNNLAGTTMDRMYQLDKKPQSVSSRANLDFDPNSNNLKLKQSVSNLIYVGDNEFDNTTDTDQSYVTTNYSKAVTQTVSTTTIKGFNINGQGLEFKLPLFIGSNKITAAFNSGTTKTNTETTTETITSGSQPVKVPAHKKYRVITSLEEVAFNGTFDYKANGTNLYNDITAKGLWIDRYGTPYRKTYNFHESVGSEWNSLNSSQKASIKEIEIILVIIV

SEQ ID NO: 33 - protein, 358 aa, Bacillus sp.
MKKYKKLLMVAPLACMLGTGVVTFPTASHADAAPVASVVNDSFGQGSTYSTENITQALFVRLRSGIEASPELRNKFKIADDERIQHEQNETIENGTKYPATNYGLRDQLSKVTASSTGTNITVNPTTVTEVEAGKIELLSYRNSTPITQKQFTTEKSMKRIDTVTATNQYGFKLGFESSTNFKVNALVAQAEQSFKASAEFNFSHTDTNTATNEETVTFKAQEVLAAPGGTTNYFTRVGKAKFSGSFQTDAALTDLKLKLPIVKKDNNQTVVHTEEVTLTSQDIYTIFKNTPYIPLPAYLSFDDNGKKVLVKNVTFSYTGEMGYNTSAQAEFIPFDQDKPKQTMSYEKYETKTQDKSL

SEQ ID NO: 34 - protein, 327 aa, Artificial sequence
  Variant of native sequence
MAPVASVVNDSFGQGSTYSTENITQALFVRLRSGIEASPELRNKFKIADDERIQHEQNETIENGTKYPATNYGLRDQLSKVTASSTGTNITVNPTTVTEVEAGKIELLSYRNSTPITQKQFTTEKSMKRIDTVTATNQYGFKLGFESSTNFKVNALVAQAEQSFKASAEFNFSHTDTNTATNEETVTFKAQEVLAAPGGTTNYFTRVGKAKFSGSFQTDAALTDLKLKLPIVKKDNNQTVVHTEEVTLTSQDIYTIFKNTPYIPLPAYLSFDDNGKKVLVKNVTFSYTGEMGYNTSAQAEFIPFDQDKPKQTMSYEKYETKTQDKSL

SEQ ID NO: 35 - protein, 280 aa, Bacillus sp.
VEVINMAILDIWTEIDKFATNYCRVRGLTYSGKRGSVPQYPLILTKFQSSLPDDRVLTPPEHVVTLPKTYDNITSQPQTTTLSFSQEITDSSSTTTTEGVTIGTELSATQTFKIKFVEVGLTQTVSSEYTTTSSKTLTTEHKRVVTSAENITVQPYTRIKAVLVIENGIYDLITNITCDLNGMIYFDATNGTSFLTTIYAVLKGNNTPDFTFSFEDPEDPTCHFNGSGKIKGNSGLNSYVRVEEYPLEGHSGQYRQYILPGQDLTTDIITSENFGIPIFN

SEQ ID NO: 36 - protein, 275 aa, Artificial sequence
  Variant of native sequence
MAILDIWTEIDKFATNYCRVRGLTYSGKRGSVPQYPLILTKFQSSLPDDRVLTPPEHVVTLPKTYDNITSQPQTTTLSFSQEITDSSSTTTTEGVTIGTELSATQTFKIKFVEVGLTQTVSSEYTTTSSKTLTTEHKRVVTSAENITVQPYTRIKAVLVIENGIYDLITNITCDLNGMIYFDATNGTSFLTTIYAVLKGNNTPDFTFSFEDPEDPTCHFNGSGKIKGNSGLNSYVRVEEYPLEGHSGQYRQYILPGQDLTTDIITSENFGIPIFN

SEQ ID NO: 37 - protein, 301 aa, Bacillus sp.
LLFMAIADLDAYLFALTKKFNPGLIGDHLFRVDTSRLTVKNAESYGFEIKNSKPQGTLFIGESELTNDTNETQTIKSDSFTKTITDSITLSVTNGIKTGIDINIGGKVFGLGVETSMSFEVSTSTTREQTSTEGVAYTVPSQDVIVPPRSKRYVYTSLQRSQLEGIIRLRANLSGLYNAVIKVQDVEMPLPPLPMYDIVKEYQSLHPLPSGISLNHNDKSVHFEGVAEYIYGTGTKFYVTITDKPSSQGIQEHKPFDAKTGLGTYELNLDGKKLSFDFNDLKDQMEPEVFEKLKELQNEIV

SEQ ID NO: 38 - protein, 298 aa, Artificial sequence
  Variant of native sequence
MAIADLDAYLFALTKKFNPGLIGDHLFRVDTSRLTVKNAESYGFEIKNSKPQGTLFIGESELTNDTNETQTIKSDSFTKTITDSITLSVTNGIKTGIDINIGGKVFGLGVETSMSFEVSTSTTREQTSTEGVAYTVPSQDVIVPPRSKRYVYTSLQRSQLEGIIRLRANLSGLYNAVIKVQDVEMPLPPLPMYDIVKEYQSLHPLPSGISLNHNDKSVHFEGVAEYIYGTGTKFYVTITDKPSSQGIQEHKPFDAKTGLGTYELNLDGKKLSFDFNDLKDQMEPEVFEKLKELQNEIV

SEQ ID NO: 39 - protein, 359 aa, Bacillus sp.
LRGCIVMVKRDISPRDLGGKDESPFLLSKEEWITIQKYTGDGAYVPVNEAEMRKALALSSSDEIPDFNELYSVYTNVKNHCQNWTDNTYREVLGVANEIVNYARRAKVYYKPLLDYLPAIIDGDTEALEMFKKICERLAKEAAEFRDHAGILATMIGTFATDTANDYQDLTVVKDKYDKKYGEHSEEVKQLRASVERLRKDLEKYMDEYEDYQSQKWLSLLLGPLFGFALKEILDSTKGKALKARIDATKQQIEESGKIIQRNVYLMSLLDKTDTGTDKIQEQMAAALPIIQKIHGIWNSLHSDLDELSKIVMEDIHDDPEFADLGVELAIMQWEAVGKQADDFRVNADVGFVVEQYTA

SEQ ID NO: 40 - protein, 353 aa, Artificial sequence
  Variant of native sequence
MVKRDISPRDLGGKDESPFLLSKEEWITIQKYTGDGAYVPVNEAEMRKALALSSSDEIPDFNELYSVYTNVKNHCQNWTDNTYREVLGVANEIVNYARRAKVYYKPLLDYLPAIIDGDTEALEMFKKICERLAKEAAEFRDHAGILATMIGTFATDTANDYQDLTVVKDKYDKKYGEHSEEVKQLRASVERLRKDLEKYMDEYEDYQSQKWLSLLLGPLFGFALKEILDSTKGKALKARIDATKQQIEESGKIIQRNVYLMSLLDKTDTGTDKIQEQMAAALPIIQKIHGIWNSLHSDLDELSKIVMEDIHDDPEFADLGVELAIMQWEAVGKQADDFRVNADVGFVVEQYTA

SEQ ID NO: 41 - protein, 808 aa, Bacillus sp.
MTKKHKKILSMTLATGVFAGTYIPTAYTAFAETEPKEDLNENQTKNINQNNLSIDLKGWFENPYKGVTFDQFINAFNNNAWNPLLVDLKNNGNAGSGTLVFLKGMMGTGLSLLPPPASLLGSVWNIFMPSTNGGTDMWQQLETYIEEKIDRKINDYHKYLMGAQFNGAMQYLKEYQRVLQIYNDSKNSLKRVEAPGTAVITAARNADSAMKAFISIIQTPEKETDSVYQQITAPIFVQAANAHLLLQRDMILYGEEWGMDKNQWQGYKDNQKKLIQEYTNYAMKVYNDGLEKRKKEAEQINTQQPNRNTDRWNHINNYVREYTLSVLDFVDLFPATNPETYSKGLMQENSRQIYSSIKGAVIPQGGTGEGTTWENIQKTLDSQVHKGDLHKLDIRSFDRIDAIQPWYSDKQNGGSNWTTPGWTGNTTGGTLKTLINPSDNPITRVKAQSSRTPNYIDFKFDTGGDNPSFGRYVSGHVSYKEDIFEYPHQKLSQVHAFNKSTYPGFEGIDAVVFGFVDKNLNESSTYLMTNMITAIPAAKYNRGMSNFQPQVESIHAKQKAMKTDTTNSYLAYGVEVSKEQEYKIRYKVAANENSKISLSSRKPGGNYAKIADTTIPITQNFADTVKGEYGSYKIVEGPTVKLTKGTHDLKLENSQGKFSIDQIELEPVEQNQVIVQDNFDDKRLNWVNYVGIVNGGMTGKAGMLDKNGNNWAYIQDQVLPFTKYTLSIKVKLNSNNDNERQKVTIYTDNLKHERITKTVELKGNAGYQEIQLEFITRRDLANTHVGILTSNGTSNILFDDVKVIGAKK

SEQ ID NO: 42 - protein, 668 aa, Artificial sequence
  Variant of native sequence
MTKKHKKILSMTLATGVFAGTYIPTAYTAFAETEPKEDLNENQTKNINQNNLSIDLKGWFENPYKGVTFDQFINAFNNNAWNPLLVDLKNNGNAGSGTLVFLKGMMGTGLSLLPPPASLLGSVWNIFMPSTNGGTDMWQQLETYIEEKIDRKINDYHKYLMGAQFNGAMQYLKEYQRVLQIYNDSKNSLKRVEAPGTAVITAARNADSAMKAFISIIQTPEKETDSVYQQITAPIFVQAANAHLLLQRDMILYGEEWGMDKNQWQGYKDNQKKLIQEYTNYAMKVYNDGLEKRKKEAEQINTQQPNRNTDRWNHINNYVREYTLSVLDFVDLFPATNPETYSKGLMQENSRQIYSSIKGAVIPQGGTGEGTTWENIQKTLDSQVHKGDLHKLDIRSFDRIDAIQPWYSDKQNGGSNWTTPGWTGNTTGGTLKTLINPSDNPITRVKAQSSRTPNYIDFKFDTGGDNPSFGRYVSGHVSYKEDIFEYPHQKLSQVHAFNKSTYPGFEGIDAVVFGFVDKNLNESSTYLMTNMITAIPAAKYNRGMSNFQPQVESIHAKQKAMKTDTTNSYLAYGVEVSKEQEYKIRYKVAANENSKISLSSRKPGGNYAKIADTTIPITQNFADTVKGEYGSYKIVEGPTVKLTKGTHDLKLENSQGKFSIDQIELEPV

SEQ ID NO: 43 - protein, 806 aa, Bacillus sp.
VRNMNLHENKNLYETLDVSSYHEYTSNRYPYAKNPNIMKNSNYKDWFNEGQVDTSAHVSTLGIMFGLFRQFTSFFRAPSGSGRIGILRRIINTIQDRSVINLTINDVQRLIDQALENEIRNQANQRFTNLQSNYNQYLVNKSYYINSPSDRSRFQFVHSLVLNEREFRNALDVTFSLANREVLLLPSFTQIAMLHLTLLQDAVTFGGPDLIAPTMSKTPRNSFLNRPPSNSYQAALLTSIRMYSNYCVRHYNQGLNLIRNRGNSGNVWLYFHSFRREMTLTVLDFVALFSLFDTTKYPAARNSTPPVVSQLSRVIYTDPVGAVQVNRRYGWFNPPVGTDRVTFTTIENEIPAPTTSRHLSELTVSSGPLGFGVNPTRTHSWQGNRNVNISAPTDVSGVISNRAQTIPARNIFRVNSRVYTLDWRLFGVYRAEFFQNASQNSQRRVFAESPPGGIGAQSTDNFRFLPGENSDTPTPHDYTHVLSRVVNATVGLTPATGNQRNSVLIFGWTHKSLTPDNIYRINEITQVAAVNTRSNSGIQVITEPGFTGGDLVRMNPNSTVSYNFTPANQQAFQSNVAIRLRYVSQGTASLRITFGNGSSQVISLVSTTSSINNIQYEGFRFINIPNNVSSLSAGNSMTIQNISTNSNVLLDRIEILSNISFPDEPPIIPGNYQVVTALNNSSVLDFNANTQNVSLWSNHGANNQRWSFTYDQQRNAYVIRSLFNSNLVLAWNVPNANRAVFVTPFLPGTNAQYWMIERFQGSYILRNRENPNMVLDVAGGNTNNGANIIVYPRHNGNAQRFFIRPV

SEQ ID NO: 44 - protein, 655 aa, Artificial sequence
  Variant of native sequence
MNLHENKNLYETLDVSSYHEYTSNRYPYAKNPNIMKNSNYKDWFNEGQVDTSAHVSTLGIMFGLFRQFTSFFRAPSGSGRIGILRRIINTIQDRSVINLTINDVQRLIDQALENEIRNQANQRFTNLQSNYNQYLVNKSYYINSPSDRSRFQFVHSLVLNEREFRNALDVTFSLANREVLLLPSFTQIAMLHLTLLQDAVTFGGPDLIAPTMSKTPRNSFLNRPPSNSYQAALLTSIRMYSNYCVRHYNQGLNLIRNRGNSGNVWLYFHSFRREMTLTVLDFVALFSLFDTTKYPAARNSTPPVVSQLSRVIYTDPVGAVQVNRRYGWFNPPVGTDRVTFTTIENEIPAPTTSRHLSELTVSSGPLGFGVNPTRTHSWQGNRNVNISAPTDVSGVISNRAQTIPARNIFRVNSRVYTLDWRLFGVYRAEFFQNASQNSQRRVFAESPPGGIGAQSTDNFRFLPGENSDTPTPHDYTHVLSRVVNATVGLTPATGNQRNSVLIFGWTHKSLTPDNIYRINEITQVAAVNTRSNSGIQVITEPGFTGGDLVRMNPNSTVSYNFTPANQQAFQSNVAIRLRYVSQGTASLRITFGNGSSQVISLVSTTSSINNIQYEGFRFINIPNNVSSLSAGNSMTIQNISTNSNVLLDRIEILSN

SEQ ID NO: 45 - protein, 803 aa, Artificial sequence
  Variant of native sequence
MNLHENKNLYETLDVSSYHEYTSNRYPYAKNPNIMKNSNYKDWFNEGQVDTSAHVSTLGIMFGLFRQFTSFFRAPSGSGRIGILRRIINTIQDRSVINLTINDVQRLIDQALENEIRNQANQRFTNLQSNYNQYLVNKSYYINSPSDRSRFQFVHSLVLNEREFRNALDVTFSLANREVLLLPSFTQIAMLHLTLLQDAVTFGGPDLIAPTMSKTPRNSFLNRPPSNSYQAALLTSIRMYSNYCVRHYNQGLNLIRNRGNSGNVWLYFHSFRREMTLTVLDFVALFSLFDTTKYPAARNSTPPVVSQLSRVIYTDPVGAVQVNRRYGWFNPPVGTDRVTFTTIENEIPAPTTSRHLSELTVSSGPLGFGVNPTRTHSWQGNRNVNISAPTDVSGVISNRAQTIPARNIFRVNSRVYTLDWRLFGVYRAEFFQNASQNSQRRVFAESPPGGIGAQSTDNFRFLPGENSDTPTPHDYTHVLSRVVNATVGLTPATGNQRNSVLIFGWTHKSLTPDNIYRINEITQVAAVNTRSNSGIQVITEPGFTGGDLVRMNPNSTVSYNFTPANQQAFQSNVAIRLRYVSQGTASLRITFGNGSSQVISLVSTTSSINNIQYEGFRFINIPNNVSSLSAGNSMTIQNISTNSNVLLDRIEILSNISFPDEPPIIPGNYQVVTALNNSSVLDFNANTQNVSLWSNHGANNQRWSFTYDQQRNAYVIRSLFNSNLVLAWNVPNANRAVFVTPFLPGTNAQYWMIERFQGSYILRNRENPNMVLDVAGGNTNNGANIIVYPRHNGNAQRFFIRPV

SEQ ID NO: 46 - protein, 658 aa, Artificial sequence
  Variant of native sequence
VRNMNLHENKNLYETLDVSSYHEYTSNRYPYAKNPNIMKNSNYKDWFNEGQVDTSAHVSTLGIMFGLFRQFTSFFRAPSGSGRIGILRRIINTIQDRSVINLTINDVQRLIDQALENEIRNQANQRFTNLQSNYNQYLVNKSYYINSPSDRSRFQFVHSLVLNEREFRNALDVTFSLANREVLLLPSFTQIAMLHLTLLQDAVTFGGPDLIAPTMSKTPRNSFLNRPPSNSYQAALLTSIRMYSNYCVRHYNQGLNLIRNRGNSGNVWLYFHSFRREMTLTVLDFVALFSLFDTTKYPAARNSTPPVVSQLSRVIYTDPVGAVQVNRRYGWFNPPVGTDRVTFTTIENEIPAPTTSRHLSELTVSSGPLGFGVNPTRTHSWQGNRNVNISAPTDVSGVISNRAQTIPARNIFRVNSRVYTLDWRLFGVYRAEFFQNASQNSQRRVFAESPPGGIGAQSTDNFRFLPGENSDTPTPHDYTHVLSRVVNATVGLTPATGNQRNSVLIFGWTHKSLTPDNIYRINEITQVAAVNTRSNSGIQVITEPGFTGGDLVRMNPNSTVSYNFTPANQQAFQSNVAIRLRYVSQGTASLRITFGNGSSQVISLVSTTSSINNIQYEGFRFINIPNNVSSLSAGNSMTIQNISTNSNVLLDRIEILSN

SEQ ID NO: 47 - protein, 775 aa, Bacillus sp.
MNRNKDCNCNDGIQKVDMSDRYPYANDPNAALQNMNYKDWLMMEQGDLYSETRDIDPVAAVSAGIIVVGTIMTAFAGLVSPGVALISFGTLAPILWPDEKNPKKVWQEFMNHGEKFQPLDDDVREEAAKHLVGFQDLVTSYERVLEDWKNEKDEKKRKALARLVFVRFEDANAAFIKSMPQLQKSNYKIVLLSVYAQAANLHLNLLHQGVQFADQWHADIFSPRTSNTYYKELLQYTEKYTDYCVETYNEGLNKLTNDSDITWNIYNAYRREMTLTILDLVALFPNYDMRRYPQGPKSELTREIYTDLSSRNELIDLERAEKSLTCKPHLFRWLKGFSFVTENVAEVKGLSGIRNWYFYTNFDTIKADTANSENSTGEVKTIYFQDSIYKLEVTRNIAGFFQNGQIRKFPNQILKVKSSISVGKQNYHGMMYNQNRNMFGSKTNVLEFPKRVGDLIGIQQNTPYYSHILSYMKKLKLDWSLEPDTYYYSFAWTHHSVDRHNRVAEDVITQIPAVKALEQNNDFVVIKGPGHTGGDLVKLNGVSKQGLKLKCVVPQNKKYKIRIRYAANKDTTLRIIIGEHDDWNEVKQTFSGDDFGKYKSFQYLETEAEVFGQGKYSTIIIKNVGSNASVLLDKIEFIPIDVKGGEQFVWSLLGSDNVEFARLDFNKQEEKMKIDLKAGIPNGELNETYASIKVKDASGQVVYNKDIYGNKELAAETKEISVKIGDFIELKHKEGEGRAILINTETNERENIGYKVKYKVGDVGSKKCLWNQVGK

SEQ ID NO: 48 - protein, 640 aa, Artificial sequence
  Variant of native sequence
MNRNKDCNCNDGIQKVDMSDRYPYANDPNAALQNMNYKDWLMMEQGDLYSETRDIDPVAAVSAGIIVVGTIMTAFAGLVSPGVALISFGTLAPILWPDEKNPKKVWQEFMNHGEKFQPLDDDVREEAAKHLVGFQDLVTSYERVLEDWKNEKDEKKRKALARLVFVRFEDANAAFIKSMPQLQKSNYKIVLLSVYAQAANLHLNLLHQGVQFADQWHADIFSPRTSNTYYKELLQYTEKYTDYCVETYNEGLNKLTNDSDITWNIYNAYRREMTLTILDLVALFPNYDMRRYPQGPKSELTREIYTDLSSRNELIDLERAEKSLTCKPHLFRWLKGFSFVTENVAEVKGLSGIRNWYFYTNFDTIKADTANSENSTGEVKTIYFQDSIYKLEVTRNIAGFFQNGQIRKFPNQILKVKSSISVGKQNYHGMMYNQNRNMFGSKTNVLEFPKRVGDLIGIQQNTPYYSHILSYMKKLKLDWSLEPDTYYYSFAWTHHSVDRHNRVAEDVITQIPAVKALEQNNDFVVIKGPGHTGGDLVKLNGVSKQGLKLKCVVPQNKKYKIRIRYAANKDTTLRIIIGEHDDWNEVKQTFSGDDFGKYKSFQYLETEAEVFGQGKYSTIIIKNVGSNASVLLDKIEFIPI

SEQ ID NO: 49 - protein, 592 aa, Bacillus sp.
MTVENNKLDQVTINEVVNTHNVEELHKLNRGVTTIIAWVAKSIGKWLLKEGLFALKDIALGKKGDPMIQIMESVEKLINQRLAQAKKDELEAEYIGFINTIDRLHDAINSLKKYENDKTSKGLEELVKAKDVIKMQISVLDGLFTQRLPQFEIKGYEGISLPLFVPVTTLHLTLLKDVVLNGKEWGFDKESIEYYQNSFHKLVPEYTKRAINLYDMERKRRNTEGKFIFKNVMKETLNLIYLWSLYQYEGINPTFSQSYWYTVGTVPGNNNSWENIYRLANGPTNAFIRAIQYHITNKALTGNDDYLHGLITYYQYHSKYRQGTGILGSHGGRLFSGDVPSWKNRAWVSDFNRTRKWYLDIGGRTVINIDSSSIPHLTGVTYEDYFIRSLSYIPYNITNLRSQFSISDILSYQDAPNNLVRGNIIVGFAPINTKTFFEKGEHHISEGKSYTFPALQLYDIQSANNAFLKEYLEQGTDGGLEIKGNKKDETCIHYRMNLENISKNQEYKTLLRFGGIGTIRMFIEHDGNERIQVGEIRTKNLYGWEDYFIDGPLPKHFKNKKVVSLIIDVGTSDVKFSQAILIPKNKFNILIP

SEQ ID NO: 50 - protein, 966 aa, Bacillus sp.
LGVMNVSSNTMVPYNVLRDMDIPTISGTRWNKEMFINALDNTSSLLTLIEKGINDGNDVLGLLSFIGLTALEAIPIVGGVLSSLVSIIFFPKKQSIDFKKIWEELEKAIEQIVDRKIEESLMSQLMQEISGFANVLEEYRDAYDLYNGNKFFDLPDKLTPGEYLVNVFTTANLLFIQRIPTFQNPKYDVVFLPFFVHVAEMHILLVRDAAIYGLEWGMDETLHQKFKKDLKDLIDKYTDYLLNTYKKGLKEASERELNDKDFPTTNNKDHYINTVRWNVINQYKRGMTLTVFDFAHKWKYYQEIYQNNITLNPFRTIYSDIAGSVYPYEKTTNEIDNIIKDQNLKYRGIFKRMQVNHAERIDSLQSTYIRNNEIIDSERTGGSGGRASILNLESPINNPLIQVNMWSELVPISLGFKLYDGKEQKIGGGSWWPNPHKFGAYHYVGNKVSSIIGFAKNETGGFNSLDAMVIGFKRDDYTPENRFVGVSKNDEPITKVIDVGNYHQGKFETNITMIDEPMFGDGVLQFENYSNNLNQESYVTYQIHTEIEGTYELHAIIGAKKQKDKISFKVTLNDKQIENFITDSFDDGDVWDGMSLNDGFVYKRILIGNFQLKKGMNSITIHTDVLQDSANIKIWNLAALELTITADSLTDPDITTLYDKDNYTGAKKFIVENTSRLTEFNDKTSSVKVSSNVSGVRLYEHYDYGGNFIDLIGGEKISLKNHPLNNRASSAKFANIVLYNQDNYEGSRKLVFEDVPELTDFNDKTSSITVSSNVLGARLYEHAHYKGSYVDVMGGQKVSLKKHKLNKKLSSIKFFEDDDKILNGVYQVVTGINNTSVIMWKTTETFARLWENNNSIYQQWKVEYDHGKQAYQIKSMADESIVLTYEHDFAWGILCNPDKGNSNQYWNFEYVGEGYYLIRNKKYPEMVFDVNNGDPNNNSIIKVNKQHDLNSPNIAAQKFRFNHINN

SEQ ID NO: 51 - protein, 956 aa, Artificial sequence
  Variant of native sequence
MVPYNVLRDMDIPTISGTRWNKEMFINALDNTSSLLTLIEKGINDGNDVLGLLSFIGLTALEAIPIVGGVLSSLVSIIFFPKKQSIDFKKIWEELEKAIEQIVDRKIEESLMSQLMQEISGFANVLEEYRDAYDLYNGNKFFDLPDKLTPGEYLVNVFTTANLLFIQRIPTFQNPKYDVVFLPFFVHVAEMHILLVRDAAIYGLEWGMDETLHQKFKKDLKDLIDKYTDYLLNTYKKGLKEASERELNDKDFPTTNNKDHYINTVRWNVINQYKRGMTLTVFDFAHKWKYYQEIYQNNITLNPFRTIYSDIAGSVYPYEKTTNEIDNIIKDQNLKYRGIFKRMQVNHAERIDSLQSTYIRNNEIIDSERTGGSGGRASILNLESPINNPLIQVNMWSELVPISLGFKLYDGKEQKIGGGSWWPNPHKFGAYHYVGNKVSSIIGFAKNETGGFNSLDAMVIGFKRDDYTPENRFVGVSKNDEPITKVIDVGNYHQGKFETNITMIDEPMFGDGVLQFENYSNNLNQESYVTYQIHTEIEGTYELHAIIGAKKQKDKISFKVTLNDKQIENFITDSFDDGDVWDGMSLNDGFVYKRILIGNFQLKKGMNSITIHTDVLQDSANIKIWNLAALELTITADSLTDPDITTLYDKDNYTGAKKFIVENTSRLTEFNDKTSSVKVSSNVSGVRLYEHYDYGGNFIDLIGGEKISLKNHPLNNRASSAKFANIVLYNQDNYEGSRKLVFEDVPELTDFNDKTSSITVSSNVLGARLYEHAHYKGSYVDVMGGQKVSLKKHKLNKKLSSIKFFEDDDKILNGVYQVVTGINNTSVIMWKTTETFARLWENNNSIYQQWKVEYDHGKQAYQIKSMADESIVLTYEHDFAWGILCNPDKGNSNQYWNFEYVGEGYYLIRNKKYPEMVFDVNNGDPNNNSIIKVNKQHDLNSPNIAAQKFRFNHINN

SEQ ID NO: 52 - protein, 730 aa, Bacillus sp.
MNSNDQNGYSNISAKSINTVRYPLANDNTTALKNMNYKEYLRMSERYNTKNSGDLNVMINGKDAVKTAIGIVGKLLSTLGVPGVGLMVSLYAALVDAVWPNGKSQWEIFMEQVEDLINQKIADYARSKALAELEGLGDNFQLYLNALKAWKENPDDASILHEVQYRFENLDGFFTQYMPSFRVSGYEVPLLTVYAQAANLHLLLLRDASVFGEEWGFSPTLVDSYYNRQMDLTANYSDHCVKWYNIGLGNLSGSTAHQWLDYNRFRTQMTLTVLDIVALFQNYDVRTYKIATTSQLTREVYTEPIGIEGQYSWYDKAPSFSAIESTVIREPHVFDSLTGFSIYTGLSRYSASNYLYLWQGHKTFHQQIGSPYSFSDIHGNIKNYSSISELDFYGGDVYRTQSTAGVLFAYTTPYYGVPKVDFNIVNPLNNNRDIVTYNPGNEGIGAQTHDSEVELPPETIDQPDYEVYSHKLCHAGMIQFPNNPHNPYVPVFSWSHRSADNTNTIYSDRITQIPAIKSLPEGNWGGVEKGPGFTGGDVTMARYENGDTLKDVVKLHVTIDPDALSQKFRVRLRYASTSNIPATLFTSDSGDRGFDLKATGQSPFTGYNDFQYVDVPGVITFTKTSDLVTVYLHMYAAQNSTIYIDKVEFIPLDETYEAEKDLNTAKKAVNALFTNTKEALKIDVTDYQVNQAQNLVECLSDDLYPDEKQLLFDAVKEAKRLGQVRNFIQK

SEQ ID NO: 53 - protein, 652 aa, Artificial sequence
  Variant of native sequence
MNSNDQNGYSNISAKSINTVRYPLANDNTTALKNMNYKEYLRMSERYNTKNSGDLNVMINGKDAVKTAIGIVGKLLSTLGVPGVGLMVSLYAALVDAVWPNGKSQWEIFMEQVEDLINQKIADYARSKALAELEGLGDNFQLYLNALKAWKENPDDASILHEVQYRFENLDGFFTQYMPSFRVSGYEVPLLTVYAQAANLHLLLLRDASVFGEEWGFSPTLVDSYYNRQMDLTANYSDHCVKWYNIGLGNLSGSTAHQWLDYNRFRTQMTLTVLDIVALFQNYDVRTYKIATTSQLTREVYTEPIGIEGQYSWYDKAPSFSAIESTVIREPHVFDSLTGFSIYTGLSRYSASNYLYLWQGHKTFHQQIGSPYSFSDIHGNIKNYSSISELDFYGGDVYRTQSTAGVLFAYTTPYYGVPKVDFNIVNPLNNNRDIVTYNPGNEGIGAQTHDSEVELPPETIDQPDYEVYSHKLCHAGMIQFPNNPHNPYVPVFSWSHRSADNTNTIYSDRITQIPAIKSLPEGNWGGVEKGPGFTGGDVTMARYENGDTLKDVVKLHVTIDPDALSQKFRVRLRYASTSNIPATLFTSDSGDRGFDLKATGQSPFTGYNDFQYVDVPGVITFTKTSDLVTVYLHMYAAQNSTIYIDKVEFIPL

SEQ ID NO: 54 - protein, 819 aa, Bacillus sp.
MKNKKQKVLHMTVAASVLATTYVPAANFAFAQEKQEQGLKETQVTPFNELKEKITENPNLDNSRMWNPYKGVDYVKFMNALNSNVWKPVLTDAVKNEGENVVPVLIKGAIVMGLSLAPPPLPILGTVVDLFQFTDGKTDDAWSRTVEYVNKTIDSKIEQYHSYLMSSELVALGSSLGEYKRVLEIYETNKLTRVEDPAAGVREQFRISNDKAKAFIAKLQHPQNQGDTRYNVLTLPLFAQAANLHLALLRDAIVCDWGIDSNQLQGYKDELKRSIIDYTNYINKTYKEGLEQEKNKAADYSDPESYIQAGKNDVPVLRQWFPEVMKWNRVANYERQMSASVLDLAAVLPTYDSDNYSKQPIVKQSRPIFAPVIGIPGGLKSKDSAGTFGSYVFDVKNFDQINTELTKSPYDYLAYGGTLNQIGLRTSGPIYGSSTNTTYYTNMTHGSTAGNQTNISISPDNPITSISGTAGTKPYTLSFQFADGTKTQTFGSNVPNGNCYAPFKFEYPGYQLSAVRVFGTSVATGDADAMVFAFRSSEIGDTHQLMANVPTQIPAEIGYGQGNTFHEVINGQNAIEMNNGNTMKYSINSPKTQQYKVRYRVAANEESSVRLQNMDTIISKTTDTSNTSMNTVKGEYGYYKLVEGPTITLNKGMNTVTLQGTKGKFALDYVEVDPVVPDGRVYFEDFIGSLKSSWYGSNSGFAPGYGTVHENGELYTFINEKVEKYSQYVMRVKLKLNSNDPNIRENVRLFTDNAKGERITKEVTLRGGADYQEFNLEFMTNDNLDKTHIGVQKASGSNTAFVKDVEVIGALNDNATPYK

SEQ ID NO: 55 - protein, 645 aa, Artificial sequence
  Variant of native sequence
MQEKQEQGLKETQVTPFNELKEKITENPNLDNSRMWNPYKGVDYVKFMNALNSNVWKPVLTDAVKNEGENVVPVLIKGAIVMGLSLAPPPLPILGTVVDLFQFTDGKTDDAWSRTVEYVNKTIDSKIEQYHSYLMSSELVALGSSLGEYKRVLEIYETNKLTRVEDPAAGVREQFRISNDKAKAFIAKLQHPQNQGDTRYNVLTLPLFAQAANLHLALLRDAIVCDWGIDSNQLQGYKDELKRSIIDYTNYINKTYKEGLEQEKNKAADYSDPESYIQAGKNDVPVLRQWFPEVMKWNRVANYERQMSASVLDLAAVLPTYDSDNYSKQPIVKQSRPIFAPVIGIPGGLKSKDSAGTFGSYVFDVKNFDQINTELTKSPYDYLAYGGTLNQIGLRTSGPIYGSSTNTTYYTNMTHGSTAGNQTNISISPDNPITSISGTAGTKPYTLSFQFADGTKTQTFGSNVPNGNCYAPFKFEYPGYQLSAVRVFGTSVATGDADAMVFAFRSSEIGDTHQLMANVPTQIPAEIGYGQGNTFHEVINGQNAIEMNNGNTMKYSINSPKTQQYKVRYRVAANEESSVRLQNMDTIISKTTDTSNTSMNTVKGEYGYYKLVEGPTITLNKGMNTVTLQGTKGKFALDYVEVDPV

SEQ ID NO: 56 - protein, 789 aa, Artificial sequence
  Variant of native sequence
MQEKQEQGLKETQVTPFNELKEKITENPNLDNSRMWNPYKGVDYVKFMNALNSNVWKPVLTDAVKNEGENVVPVLIKGAIVMGLSLAPPPLPILGTVVDLFQFTDGKTDDAWSRTVEYVNKTIDSKIEQYHSYLMSSELVALGSSLGEYKRVLEIYETNKLTRVEDPAAGVREQFRISNDKAKAFIAKLQHPQNQGDTRYNVLTLPLFAQAANLHLALLRDAIVCDWGIDSNQLQGYKDELKRSIIDYTNYINKTYKEGLEQEKNKAADYSDPESYIQAGKNDVPVLRQWFPEVMKWNRVANYERQMSASVLDLAAVLPTYDSDNYSKQPIVKQSRPIFAPVIGIPGGLKSKDSAGTFGSYVFDVKNFDQINTELTKSPYDYLAYGGTLNQIGLRTSGPIYGSSTNTTYYTNMTHGSTAGNQTNISISPDNPITSISGTAGTKPYTLSFQFADGTKTQTFGSNVPNGNCYAPFKFEYPGYQLSAVRVFGTSVATGDADAMVFAFRSSEIGDTHQLMANVPTQIPAEIGYGQGNTFHEVINGQNAIEMNNGNTMKYSINSPKTQQYKVRYRVAANEESSVRLQNMDTIISKTTDTSNTSMNTVKGEYGYYKLVEGPTITLNKGMNTVTLQGTKGKFALDYVEVDPVVPDGRVYFEDFIGSLKSSWYGSNSGFAPGYGTVHENGELYTFINEKVEKYSQYVMRVKLKLNSNDPNIRENVRLFTDNAKGERITKEVTLRGGADYQEFNLEFMTNDNLDKTHIGVQKASGSNTAFVKDVEVIGALNDNATPYK

SEQ ID NO: 57 - protein, 945 aa, Bacillus sp.
MIMQMVTKAMTPKLGALPDFIDDFNGIFGFMDNITGVMSTIFGVDTGDSSIDDVLNNQELLQEMQAQMQQIQESIKDMTDKEIITQSIEEQILALTKDLSTSITTEFEKIGNILTTYLQAMSGMLKDIYSQTSVIDQKVDKLLAMMTFALKELDYIKDNVVLNSSIVEITPHVQKLVYVNKKFLSLTRGFLQGEDLSIDSMQEIQEWAKSILATEMNSFEFSVDTLHSIIIGDNLYKRSALKTFSDVLLDDADQYGDFGTPLAKFYTFFSSLATLQINAYLCLTFARKVLGLSEIDYPIIMQDRIEQQNQLFVNLIQDKNYSNVLEIKGIYPMPHHNEDGNSLNLQAEEGYALIGLEFFMDNGIYKAKAYQGKIGKNFSVSADTVIEIISDDLSKVFLNNTKDFESYKYPLFGELKGEPNMLITRIGFGTKYDESREKQAVAYIDADFSPYEPKSGSISTEGTQTFQIEETKNYTYCYDAWPIGIIGDLYMTPLKSISLHVDGDSRKNLYMCGESYLSTILSREYNTNFILFPYTNNSSPIIENLIQNGDFEDEDTHWEVSGDTAVIAKGEGINGSKAMKLENGTIEQKLNLKPYTNYEFTAYTKGKSAKFLIRDNTLADFADGYLDSTIYKKIKFRFKTEMDASGFIVSATSPQEIFVDNIKVCEVTEADNLIDCGDFDFYEINEENLKIRLYPNHWELYGGSNIMLEQGMFHSDALKIINSGGANQKVQLKANTNYILTAYVKVDDSTTIAQIGCGNNQVPCNSTSYTLVKVKFKTGDDPSTTESSVYCSNINDSGTIWADNFVLCEVPNLIVNGDFEQMDLSSWSLSPSERGTIYIGIGEGISNSNAIVLQDSKGQISQKVPLKPNTNYRLTAYVSVKGGTAQIGYGEYGASCTSKEFQQISKDFTTGADPLQSDDVIYLSTDGCTYAIADNFELYELDQIE

SEQ ID NO: 58 - protein, 373 aa, Bacillus sp.
VGKSMTFKVGMKYMFKNKNSRKYLDISGNETGNNANVQQYEYLKDAPSERFFLHPLDNNYYAMINLNSGKVIDISGNETGNNANIQQFEWLGDAPSEYWYFHREADGYYVIESKHSGKVLDISGNETGNNANVQQFEFLADAPSERFAVEEAGSVSLPSISTQPLSPVPQYETINDQLPEETERVVTAFTIVPAISVKDPHYGGDTAKQIKENPYYMVVKRQWWKKQESYVLAPSERYDFVTTTGIRVTDQETATKTVSWSIGADMGFNFKGFSLGMSSQYSQELQTSISHTTEQLKEETQEHHITNPFAERMAYSRYILTTEYYVQRKNGTIVNAPWTMTDKTNAHAVTYPKSKENVLNENIKQLQKNESVN

SEQ ID NO: 59 - protein, 369 aa, Artificial sequence
  Variant of native sequence
MTFKVGMKYMFKNKNSRKYLDISGNETGNNANVQQYEYLKDAPSERFFLHPLDNNYYAMINLNSGKVIDISGNETGNNANIQQFEWLGDAPSEYWYFHREADGYYVIESKHSGKVLDISGNETGNNANVQQFEFLADAPSERFAVEEAGSVSLPSISTQPLSPVPQYETINDQLPEETERVVTAFTIVPAISVKDPHYGGDTAKQIKENPYYMVVKRQWWKKQESYVLAPSERYDFVTTTGIRVTDQETATKTVSWSIGADMGFNFKGFSLGMSSQYSQELQTSISHTTEQLKEETQEHHITNPFAERMAYSRYILTTEYYVQRKNGTIVNAPWTMTDKTNAHAVTYPKSKENVLNENIKQLQKNESVN

SEQ ID NO: 60 - protein, 299 aa, Bacillus sp.
LRFMAIFDFDAYLLALANKVFPLPWISRVDTSNLSVKNAESYGFEIKNSKPQGTMFIGESVLTNNTNETQTIKSDSFTKTITDSITLSVTNGIKTGIDISIGGKVFGMGVETSMSFEVSTSTTREQTSTESVAYTVPSQDVVVPPQSKRYVYTSLQRSQLEGIIRLRADLSGLFVGYIKWDSGEESPIVGGDIYQYINTNQLLHPLPSGISLKHQDKAIHFEGVAEYIYGTGTKFYVTITDTPSSQGTLEQKPFDTKTGLGTYEIDLDGKKLGFDLNDLKDQMEPGVFEKLKELQNEIV

SEQ ID NO: 61 - protein, 299 aa, Artificial sequence
  Variant of native sequence
MRFMAIFDFDAYLLALANKVFPLPWISRVDTSNLSVKNAESYGFEIKNSKPQGTMFIGESVLTNNTNETQTIKSDSFTKTITDSITLSVTNGIKTGIDISIGGKVFGMGVETSMSFEVSTSTTREQTSTESVAYTVPSQDVVVPPQSKRYVYTSLQRSQLEGIIRLRADLSGLFVGYIKWDSGEESPIVGGDIYQYINTNQLLHPLPSGISLKHQDKAIHFEGVAEYIYGTGTKFYVTITDTPSSQGTLEQKPFDTKTGLGTYEIDLDGKKLGFDLNDLKDQMEPGVFEKLKELQNEIV

SEQ ID NO: 62 - protein, 667 aa, Bacillus sp.
MNRKKDCNCNDGIQTVASNMSDRYPYANDPSAVLQNMDYKDWLVMGQERGENPESLLETKDGVNAAVAMVGTLMWTFGNPAFTGPLGGVICAFGLLIPILWPDTQEPQKQKVWEDLINHGDEFFDEKIGKAEKARAKTFIAGMKVVLENYEEALKKWKENKNAHHAATVQMEFNDAGDYFDKGLGDLQLEGYQQILLPCYAQAALLHLNLLSQGVQYANEWGKYNPGPTSEYWLEMLKRKDKKNPGRIQKYVDYCTDTYRAGLNKLKNAKGINWPIYNQYRTDMTLTVLDLVAFFPNYDVDRYPKGTRSELTREIYTPLSNPYMESKINIDEHENLLTRKPHLFTVLRRNTFYTEKRPSGYQSLAGIRNFSKYIHDNNVLEGDIHGIEQSTYMDWEMNWINSPIDEILVQRELKWDPATPSVRDVPDGIRRIHVKPVKPVSTEESEFITIYRTGGKDYPEEKVDHIKITKPESACQTNTQPCMPNISYSHILSYISMGRREKSSVNYPRFMYSFAWTHHSVDRHNTIAEDTITQIPAVKASGENPDFSVVKGPGHTGGDLVELSGKSEKGLVIKCSVPKAKNYRIRLRYAANKDTRVTVQVSGDNSHGLIPAKKTYDDNNYKGFSSFDHLDTNATVSCLNKRAVITIKNDLADTSILIDKIEFIPLD

SEQ ID NO: 63 - protein, 666 aa, Artificial sequence
  Variant of native sequence
MNRKKDCNCNDGIQTVASNMSDRYPYANDPSAVLQNMDYKDWLVMGQERGENPESLLETKDGVNAAVAMVGTLMWTFGNPAFTGPLGGVICAFGLLIPILWPDTQEPQKQKVWEDLINHGDEFFDEKIGKAEKARAKTFIAGMKVVLENYEEALKKWKENKNAHHAATVQMEFNDAGDYFDKGLGDLQLEGYQQILLPCYAQAALLHLNLLSQGVQYANEWGKYNPGPTSEYWLEMLKRKDKKNPGRIQKYVDYCTDTYRAGLNKLKNAKGINWPIYNQYRTDMTLTVLDLVAFFPNYDVDRYPKGTRSELTREIYTPLSNPYMESKINIDEHENLLTRKPHLFTVLRRNTFYTEKRPSGYQSLAGIRNFSKYIHDNNVLEGDIHGIEQSTYMDWEMNWINSPIDEILVQRELKWDPATPSVRDVPDGIRRIHVKPVKPVSTEESEFITIYRTGGKDYPEEKVDHIKITKPESACQTNTQPCMPNISYSHILSYISMGRREKSSVNYPRFMYSFAWTHHSVDRHNTIAEDTITQIPAVKASGENPDFSVVKGPGHTGGDLVELSGKSEKGLVIKCSVPKAKNYRIRLRYAANKDTRVTVQVSGDNSHGLIPAKKTYDDNNYKGFSSFDHLDTNATVSCLNKRAVITIKNDLADTSILIDKIEFIPL

SEQ ID NO: 64 - protein, 795 aa, Bacillus sp.
MNQYNNKNDYEIIDSADMYYQPKYPLAEAPCSELQQISYEKVMNTSVGREYQAVQQVNVGESVSAALGILATILKAVNPTLGAAAGVISKIFGFLWKQFGTDPQAQWKQFMEAVEYLVNQKITDAVRSKAVSELAGVQNALELYQEAADDWNINPNDTSAKERVRRQFSSTNTTIEFAMPSFRVSGFEVPLLTVFAQAANLHLLLLRDAVKFGNEWGMPAAEVEDYYTRLQKRTAEYTDYCTNTYDKGLKQAYDLAPNPTDYNKYPYLNPYSKDPIYGKYYTAPVDWNLFNDFRRDMILMVLDIVAVWPTYNPKIYNNPYGVQIQLSREVYSTVYGRGWTNNSSVDAIEYTLVRPPHLVTELKKLAFDERNLFEAETVPIAFSKVTNTLQYVGSSTTWEQSFSVPPIASIKTVHNVSATDIGNLSLSLGAVPFGFSFYNKNDNPITTVGYSGGWWNGIPKDEGSNQNSHHLSYVAALETQTTAGWFPTYPVPLLGEWGFGWLHNSLTSTNTIVTDRTTQIPAVKAYWNRGAFSVVKGPGSTGGDLVQLSPSGEVSIMVKPSRPGIGSYRVRIRYAATANGRLNVKKYVDRVHASVTYDYKQTTTGNLTYSSFQYLDVYNFNLAESQFEVWLTNESGGPIYIDKIEFIPVNPIPEPPESGPGYGNYQIIYALSSGAVGITSSSTNTKMAITQNNHGNNQKWLFEYDSSKNAYQIRNSERKDLVFDYNTFGILYALPNEHKETQYWTIENVGDGNVYLKNNQGLYVTANSLPGSYELILSPLYSHLKSQRFTLQKSN

SEQ ID NO: 65 - protein, 649 aa, Artificial sequence
  Variant of native sequence
MNQYNNKNDYEIIDSADMYYQPKYPLAEAPCSELQQISYEKVMNTSVGREYQAVQQVNVGESVSAALGILATILKAVNPTLGAAAGVISKIFGFLWKQFGTDPQAQWKQFMEAVEYLVNQKITDAVRSKAVSELAGVQNALELYQEAADDWNINPNDTSAKERVRRQFSSTNTTIEFAMPSFRVSGFEVPLLTVFAQAANLHLLLLRDAVKFGNEWGMPAAEVEDYYTRLQKRTAEYTDYCTNTYDKGLKQAYDLAPNPTDYNKYPYLNPYSKDPIYGKYYTAPVDWNLFNDFRRDMILMVLDIVAVWPTYNPKIYNNPYGVQIQLSREVYSTVYGRGWTNNSSVDAIEYTLVRPPHLVTELKKLAFDERNLFEAETVPIAFSKVTNTLQYVGSSTTWEQSFSVPPIASIKTVHNVSATDIGNLSLSLGAVPFGFSFYNKNDNPITTVGYSGGWWNGIPKDEGSNQNSHHLSYVAALETQTTAGWFPTYPVPLLGEWGFGWLHNSLTSTNTIVTDRTTQIPAVKAYWNRGAFSVVKGPGSTGGDLVQLSPSGEVSIMVKPSRPGIGSYRVRIRYAATANGRLNVKKYVDRVHASVTYDYKQTTTGNLTYSSFQYLDVYNFNLAESQFEVWLTNESGGPIYIDKIEFIPV

SEQ ID NO: 66 - protein, 564 aa, Bacillus sp.
MNQDVTRAREAVNTLFLNDALQLKVTDYQVDQAAKLVECISDPIYTKEKMCLLEQVKLAKRLSRTRNLLNYGDFESPKWWEENGWKTSTYVSVRSDNPIFTGRYLHLPSAYQPQFSNRIFPTYAYQKIEESKLKPYTRYSLRAFIGNSTDLEVFAIRYDKDVHKKICVPNDIIPTNPCTGEYLLKQNCHPVVTNQVIPQNTFYDSCGNGSHRIIQQTSTVCTDPHEWQCHIDTGELDMIQNLGIWVGFKIGTTDGIATIDNVEVVEVGPLTGDALTRMKKREQRWQKKWAEKQMRIERDVQAANQAIQALFTDSNQNQLQSTITLKQILEAETWVEQIPYVYNPFLVGAIPVVPGETYDIFQQLAITIGIARGLYTQRNLVRNGDFTAGLANWNATEGAEVQQIGNISVLKLSDWSATVSQHVCVKPEHSYLLRVTARKEDTGEGYVTISDGTIDNTETLNFTVEEGTTSIMNYASNPYETNAYPNNITNNQKMGCGCYDNYRCCHNNDEYPIMEQNTLDLSNYITKTVEIFPETNHVCIEIGETAGTFEVASIELIAIECECE

SEQ ID NO: 67 - protein, 645 aa, Bacillus sp.
MNNSIQMTKQNSTISYPDLNKRNSLCHTSFTMGINDHIKNSTIFAVSVLGAITSATQPFVGATFATTSYILPIIWPSIGISSAQSFLCAAENLINEKLSTFVNEQAQSRFNGLKNTIYLFNISVNQYIKDVENLIRPDPTFVISQFVATNTTFAASMPLFQVKGYEILLLPLFTQAANLYLLFLRDAIAFFKKYQSIESSIHQQVQITIDYSEKLIDEYIDYCVEIYHDGLQILNDPQKHADLTDRLRYPWIEWTGFLSPQPNWNEYQGIEDWNLMNDYRRTYTITVLDFLSLWSTYSQNYYNIPKVKLSLTRELYTPARGKSTFHPQTPHKRTRKEIEESIVRPPHLVTWLDDAFINLRNYKKHPISGADILYSTSGYFNKTQHSSIGFPGVTSCSIYDYSIVKNEMILNDDRYVANVKFYNQNNELINQCGDPIKNTFTFINSIPDSTEIAVSSSNIFLNRLSDIRGGIPYQNEFYNNDANGHLDYISLAWVHPNLDRFNNIFSDQVTQISVVRANELLGDASVIKGPGSTGGNLIRLGEKGGVQISISFPNNQNNFTMRIRCAHKYERGVLQIRTEYKNTTVYIPFNPNYNEKLHYKSFKFIDVPKEFILDAKERFLTLYLDNLGTEVILDKIEFIPLVVPL

SEQ ID NO: 68 - protein, 641 aa, Artificial sequence
  Variant of native sequence
MNNSIQMTKQNSTISYPDLNKRNSLCHTSFTMGINDHIKNSTIFAVSVLGAITSATQPFVGATFATTSYILPIIWPSIGISSAQSFLCAAENLINEKLSTFVNEQAQSRFNGLKNTIYLFNISVNQYIKDVENLIRPDPTFVISQFVATNTTFAASMPLFQVKGYEILLLPLFTQAANLYLLFLRDAIAFFKKYQSIESSIHQQVQITIDYSEKLIDEYIDYCVEIYHDGLQILNDPQKHADLTDRLRYPWIEWTGFLSPQPNWNEYQGIEDWNLMNDYRRTYTITVLDFLSLWSTYSQNYYNIPKVKLSLTRELYTPARGKSTFHPQTPHKRTRKEIEESIVRPPHLVTWLDDAFINLRNYKKHPISGADILYSTSGYFNKTQHSSIGFPGVTSCSIYDYSIVKNEMILNDDRYVANVKFYNQNNELINQCGDPIKNTFTFINSIPDSTEIAVSSSNIFLNRLSDIRGGIPYQNEFYNNDANGHLDYISLAWVHPNLDRFNNIFSDQVTQISVVRANELLGDASVIKGPGSTGGNLIRLGEKGGVQISISFPNNQNNFTMRIRCAHKYERGVLQIRTEYKNTTVYIPFNPNYNEKLHYKSFKFIDVPKEFILDAKERFLTLYLDNLGTEVILDKIEFIPL

SEQ ID NO: 69 - protein, 478 aa, Bacillus sp.
MKYKDRIQAKRNYKQTIFTAATTLTLGVSVLAGPVSAFAAEKEPGAQKQVPKTTENTKDTQIQSHLIKAMTDVTDIIKVGGDGSIEVSKEFKDDYAKKALSRMGGTALQDAYKNAHGSNLTFNDFSRDMVIAGTTAIPYGGAFIAPLLGILWPSSVNAENQMQKLIEQISAIIDQKIVDYDKGSLKTDVKALMNELQILEDSVNGKPKASLYEGSIQETNRTQAKIVNTAFHKLIENCQKEEQYQAELPIYVIAATAHLEFLKFIETNGKGPRMQFDDESLQTYFLKDLKDKPDEYKNYIKKTADETFRKISKQISGNETFFENSYRRLNSLRQEIRELSQQPQNMQNFVRLKAVKEEEKSVVSYMEKIITKIEPYALDTVGSAAFQVAYDATKGQPYSDPGNWVKKGGGDEVWYFQKDGNTKKGWIKDKGSWYYLSPEMDGRMLQAYPGDAVPANAPLHLFSINGHIVEGIDGDNMK

SEQ ID NO: 70 - protein, 440 aa, Artificial sequence
  Variant of native sequence
MAEKEPGAQKQVPKTTENTKDTQIQSHLIKAMTDVTDIIKVGGDGSIEVSKEFKDDYAKKALSRMGGTALQDAYKNAHGSNLTFNDFSRDMVIAGTTAIPYGGAFIAPLLGILWPSSVNAENQMQKLIEQISAIIDQKIVDYDKGSLKTDVKALMNELQILEDSVNGKPKASLYEGSIQETNRTQAKIVNTAFHKLIENCQKEEQYQAELPIYVIAATAHLEFLKFIETNGKGPRMQFDDESLQTYFLKDLKDKPDEYKNYIKKTADETFRKISKQISGNETFFENSYRRLNSLRQEIRELSQQPQNMQNFVRLKAVKEEEKSVVSYMEKIITKIEPYALDTVGSAAFQVAYDATKGQPYSDPGNWVKKGGGDEVWYFQKDGNTKKGWIKDKGSWYYLSPEMDGRMLQAYPGDAVPANAPLHLFSINGHIVEGIDGDNMK

SEQ ID NO: 71 - protein, 750 aa, Bacillus sp.
MNQHYNKNEFEIIDSAVMYSQPRYPLANAPDFEQQNINIDVRTAIVASVKVVGTLLGKFIPGFGMFGPLIDFLWPKDTEATWRAFMSAVEELVDQKINDLKRSEALSRLEGLLNTLKLYQTAASNWEKDPQNPKLQETVRNQFIATNTFMFGSMPMFRVSGFELPMLTMYAEAANLHLLLLQDAVKFGRSWGMDTVTVNSYQSNLETAIKIYTDSCISTYNQGLEQAKTLPADGDVAKWNAYNDYRRDMTLMVLDLVAIWSTYNTTQYPLPVNVQLTREIYTELRGWYAGKLEITEAQLVRPPHLFTFFQSANLYIDYASPFPLGGIQQTVHYPLGANLETAVKGQTSNYLSKVTATPSDAVINRVDTQIFNCVTGLKFYQQYATEPFVTPIWSTFTPGVYPEINMNRIPIEGDQTQANHRMSWISGYWHPVSYTPPYPYNFSCITFGWTHLSADLDNRIYSDSITQIPAVKGYTLEHGAAVVKGPGSTGGDLVRLPAYNDIWTQLRIKMRMNTWGTGKKYKIRIRYASEGAANLFVGRYVDATNSWWETGNYAVKQTFSGSMIYNSFEYLDTFSYTATEPEFKIELRCNSGSSIYIDKIEFIPETPEPPETPVVEGVYQIVTALNNSSVVDLSLRDGIVQLYGNGNASNQKWRFVFDTSKRAYQIRNIANESIVLTWVSPNSVQGITNQSYYSQYWIIRDAGNGYVYLSNYDNPNLVLDVTAGNIANGTPIVAWSFNGGTNQKFKLNKL

SEQ ID NO: 72 - protein, 605 aa, Artificial sequence
  Variant of native sequence
MNQHYNKNEFEIIDSAVMYSQPRYPLANAPDFEQQNINIDVRTAIVASVKVVGTLLGKFIPGFGMFGPLIDFLWPKDTEATWRAFMSAVEELVDQKINDLKRSEALSRLEGLLNTLKLYQTAASNWEKDPQNPKLQETVRNQFIATNTFMFGSMPMFRVSGFELPMLTMYAEAANLHLLLLQDAVKFGRSWGMDTVTVNSYQSNLETAIKIYTDSCISTYNQGLEQAKTLPADGDVAKWNAYNDYRRDMTLMVLDLVAIWSTYNTTQYPLPVNVQLTREIYTELRGWYAGKLEITEAQLVRPPHLFTFFQSANLYIDYASPFPLGGIQQTVHYPLGANLETAVKGQTSNYLSKVTATPSDAVINRVDTQIFNCVTGLKFYQQYATEPFVTPIWSTFTPGVYPEINMNRIPIEGDQTQANHRMSWISGYWHPVSYTPPYPYNFSCITFGWTHLSADLDNRIYSDSITQIPAVKGYTLEHGAAVVKGPGSTGGDLVRLPAYNDIWTQLRIKMRMNTWGTGKKYKIRIRYASEGAANLFVGRYVDATNSWWETGNYAVKQTFSGSMIYNSFEYLDTFSYTATEPEFKIELRCNSGSSIYIDKIEFIPE

SEQ ID NO: 73 - protein, 882 aa, Bacillus sp.
LHLASKYFNDSGKIIKICREEQKGMKNKKKYIKPLAVGLLATNIIGFGTQTVAFAATDKAVSKEQMQQKMKTQNNSFNPTVLASIPSDTSELQKMLEDAITNKDTQITPELIKKLQDKGFDYLSIVKALTGGLIKQIPYAGSILSPLVTGLFPGKGYVTKENVWGEIQDRVSNLIDQKLEQSQIENLIGKLKGVHDNLGVYQTRVGLVNGIKPPIADFIQKDANSDKNKENLRSTISSLDLDLGRLVPEFAVEGYEAASLPYYVQIANVHLFLLKDAVTHADEWQLTVDEKRGYLSRLQQKIEEYSNTVYDSFNKGVEAAKSKGGSTADSWNRVNSYVRTMTLYGLDFVALWPAFDTKGYNQPVKLQQTRELYSNMLGRPINWQDYDTTLQQIHNSGYAGYPGELKQVSVSQWDRIDGIKEIFDWTGDGSRDYTLQWGRANKNGYSDRSPTVDNPAIGISTYESNDANFYNMSTITYKQNNEVSWFYGPFTTRGDSKDGSRIDSKAPAGHKLSRVKVQEKRSDLNTISSFVAAYIPEEVHPQNILEAKAITGVPAEKYLAHAGFENKIEYMNGSNAMVSSKNGDTIDYNVQSPGKQKYKIRLRVATNSDTPVGISINGNSQQVNIKNTEASAKIEDGIKIKGVNGNYMLIEGPTVELNPGVNTIQLKNSGGAKIALDRIEFEPIGGDVRELKQEGDKWYCYENGKKVTGWQQFDGVRYYFGKTGDGSGMNTEGEMAKGWKTIDGVKYYFNKTGDGSGMQHEGELARGWKTIDGVKYYFGQHGDGSRMKYEGEMAKGWKTIDGVKYYFNKTGDGSGMQHEGELARGWKTIDGVKYYFARTGDGSDMNHEGEMAIGNRTIDGVKHYFNKTGDGTGYNHEGELEW

SEQ ID NO: 74 - protein, 660 aa, Artificial sequence
  Variant of native sequence
MKNKKKYIKPLAVGLLATNIIGFGTQTVAFAATDKAVSKEQMQQKMKTQNNSFNPTVLASIPSDTSELQKMLEDAITNKDTQITPELIKKLQDKGFDYLSIVKALTGGLIKQIPYAGSILSPLVTGLFPGKGYVTKENVWGEIQDRVSNLIDQKLEQSQIENLIGKLKGVHDNLGVYQTRVGLVNGIKPPIADFIQKDANSDKNKENLRSTISSLDLDLGRLVPEFAVEGYEAASLPYYVQIANVHLFLLKDAVTHADEWQLTVDEKRGYLSRLQQKIEEYSNTVYDSFNKGVEAAKSKGGSTADSWNRVNSYVRTMTLYGLDFVALWPAFDTKGYNQPVKLQQTRELYSNMLGRPINWQDYDTTLQQIHNSGYAGYPGELKQVSVSQWDRIDGIKEIFDWTGDGSRDYTLQWGRANKNGYSDRSPTVDNPAIGISTYESNDANFYNMSTITYKQNNEVSWFYGPFTTRGDSKDGSRIDSKAPAGHKLSRVKVQEKRSDLNTISSFVAAYIPEEVHPQNILEAKAITGVPAEKYLAHAGFENKIEYMNGSNAMVSSKNGDTIDYNVQSPGKQKYKIRLRVATNSDTPVGISINGNSQQVNIKNTEASAKIEDGIKIKGVNGNYMLIEGPTVELNPGVNTIQLKNSGGAKIALDRIEFEPI

SEQ ID NO: 75 - protein, 858 aa, Artificial sequence
  Variant of native sequence
MKNKKKYIKPLAVGLLATNIIGFGTQTVAFAATDKAVSKEQMQQKMKTQNNSFNPTVLASIPSDTSELQKMLEDAITNKDTQITPELIKKLQDKGFDYLSIVKALTGGLIKQIPYAGSILSPLVTGLFPGKGYVTKENVWGEIQDRVSNLIDQKLEQSQIENLIGKLKGVHDNLGVYQTRVGLVNGIKPPIADFIQKDANSDKNKENLRSTISSLDLDLGRLVPEFAVEGYEAASLPYYVQIANVHLFLLKDAVTHADEWQLTVDEKRGYLSRLQQKIEEYSNTVYDSFNKGVEAAKSKGGSTADSWNRVNSYVRTMTLYGLDFVALWPAFDTKGYNQPVKLQQTRELYSNMLGRPINWQDYDTTLQQIHNSGYAGYPGELKQVSVSQWDRIDGIKEIFDWTGDGSRDYTLQWGRANKNGYSDRSPTVDNPAIGISTYESNDANFYNMSTITYKQNNEVSWFYGPFTTRGDSKDGSRIDSKAPAGHKLSRVKVQEKRSDLNTISSFVAAYIPEEVHPQNILEAKAITGVPAEKYLAHAGFENKIEYMNGSNAMVSSKNGDTIDYNVQSPGKQKYKIRLRVATNSDTPVGISINGNSQQVNIKNTEASAKIEDGIKIKGVNGNYMLIEGPTVELNPGVNTIQLKNSGGAKIALDRIEFEPIGGDVRELKQEGDKWYCYENGKKVTGWQQFDGVRYYFGKTGDGSGMNTEGEMAKGWKTIDGVKYYFNKTGDGSGMQHEGELARGWKTIDGVKYYFGQHGDGSRMKYEGEMAKGWKTIDGVKYYFNKTGDGSGMQHEGELARGWKTIDGVKYYFARTGDGSDMNHEGEMAIGNRTIDGVKHYFNKTGDGTGYNHEGELEW

SEQ ID NO: 76 - protein, 684 aa, Artificial sequence
  Variant of native sequence
LHLASKYFNDSGKIIKICREEQKGMKNKKKYIKPLAVGLLATNIIGFGTQTVAFAATDKAVSKEQMQQKMKTQNNSFNPTVLASIPSDTSELQKMLEDAITNKDTQITPELIKKLQDKGFDYLSIVKALTGGLIKQIPYAGSILSPLVTGLFPGKGYVTKENVWGEIQDRVSNLIDQKLEQSQIENLIGKLKGVHDNLGVYQTRVGLVNGIKPPIADFIQKDANSDKNKENLRSTISSLDLDLGRLVPEFAVEGYEAASLPYYVQIANVHLFLLKDAVTHADEWQLTVDEKRGYLSRLQQKIEEYSNTVYDSFNKGVEAAKSKGGSTADSWNRVNSYVRTMTLYGLDFVALWPAFDTKGYNQPVKLQQTRELYSNMLGRPINWQDYDTTLQQIHNSGYAGYPGELKQVSVSQWDRIDGIKEIFDWTGDGSRDYTLQWGRANKNGYSDRSPTVDNPAIGISTYESNDANFYNMSTITYKQNNEVSWFYGPFTTRGDSKDGSRIDSKAPAGHKLSRVKVQEKRSDLNTISSFVAAYIPEEVHPQNILEAKAITGVPAEKYLAHAGFENKIEYMNGSNAMVSSKNGDTIDYNVQSPGKQKYKIRLRVATNSDTPVGISINGNSQQVNIKNTEASAKIEDGIKIKGVNGNYMLIEGPTVELNPGVNTIQLKNSGGAKIALDRIEFEPI

SEQ ID NO: 77 - protein, 292 aa, Bacillus sp.
MYNSSGTGSGVNDQKWTMVGATGGGYFRLAERTKSMNVCGWHNASNAKYTAVNSSNNSDHNLQYRYYSLYYNLHMPILPAKQQIVVPRLLTNIDDIGEAETKKAIQSAAIVPCVMINDTGVPVAQRIKDNPYYVIIKKEYWKRGDRIVLSPGQTYELTTKVGISSSTQTSIKRTLNLGINADFKLNFLPGLEALKASISTGLETQTTQTSTELTEITDKRTTTNGTDFDKSYIMYYKATEYSLMRANTGVVTGAWEIVDVNFCQYYGLIPLIHLMIVFYKYEGVTKFINIQK

SEQ ID NO: 78 - protein, 295 aa, Bacillus sp.
LDMKKKTILCSIIASTLLGGGTLVNTASAAEIPKENNNIVNYKDIRQQGAIIDIDQKIYNMIKAIPRDPFGFGAYRDDESEESFNVSGINIKETNATNITPLFLGQNTFNNASDLEQTYNTSEFSQAITQETSTTTQLGFNASTTAGGKAGIPFVAEGEVSATLEFNYSHTGTDTSSTTNTITAPSQSVKVPAHKIYKAEVYFEKKKTSGQVEMYADILTHVNQGRNRMTIGKALDITKNKYGLIKSPNDPDQVRAKGNGHFTIEYGTNLIVKTYDITSGQKSAKLIDTKTISLK

SEQ ID NO: 79 - protein, 267 aa, Artificial sequence
  Variant of native sequence
MAEIPKENNNIVNYKDIRQQGAIIDIDQKIYNMIKAIPRDPFGFGAYRDDESEESFNVSGINIKETNATNITPLFLGQNTFNNASDLEQTYNTSEFSQAITQETSTTTQLGFNASTTAGGKAGIPFVAEGEVSATLEFNYSHTGTDTSSTTNTITAPSQSVKVPAHKIYKAEVYFEKKKTSGQVEMYADILTHVNQGRNRMTIGKALDITKNKYGLIKSPNDPDQVRAKGNGHFTIEYGTNLIVKTYDITSGQKSAKLIDTKTISLK

SEQ ID NO: 80 - protein, 407 aa, Bacillus sp.
MITHKGNDELMNHISKENMDVNLKSKHDEKPCNCEPVGYTTPNLPEESRKFQTITSFFSDNTSSFYARPNKSGEDIGPGECGKLNLGNQIVCDAYNKKLDENLFVFYQLDNGYFAIANRETGEVLEHMYENDDKEEASIVFRPYTGEDSQVIKKTVSQVLPIFNLSVENGNKLIGLCNNNLDEKTKVTTRLSHVKGNETVFTHLEESEDIAIPSLPSTSELGPVPEVTGFNDPLPENDKAKRAIKGSVLIPSILVNDHLSLADRIKKNPYYTLEYRQYWHLVWSDLFTAGSNKIKTEVTGISNDAQEKMKLAVGMSVGTDLGLNFTEKSEPFMKQIISGLNGKESHTVDLGETTTITDVENPEDFTVRFARYARAHEFVLKDSDGKVAGGPWVVVDGNEMYLKRYKK

SEQ ID NO: 81 - protein, 397 aa, Bacillus sp.
MGLLYGDTYYIKRRLYMIRYNKIKKVMPIAVLSTMFLLSPAATFAAEITKADYPTAKSELIGGMYFSGNNGGATQTSSYSQDQLKKDLADRMIPAMSHRPDLFGLSGAPQSEDVLRNQYRMKFKDATTKFEGYTNSGNINTDVTVNHYEDARQVELLSYRNATPVNQNFNTPERTLKTSESFTYSNQEGVKLGVGSDTKVKASIPFIGEAEETIKITSEFSYNRTSSNTSSQEETTIFKSQPVVCIPGHTTQFVGTVQNAVFSGSFTGTAAVNGDIEWTMRLPGTDHDTVVNTANFAEGPQYQFQDAKGRMLYNIFKYSGMKLPSYVHLDDINHRVLIDDVKSTYSGIGGHYSRVEVKVFPNSRSNENAVTMPYAEYIQKVQNGTLQKELEQHYKKA

SEQ ID NO: 82 - protein, 353 aa, Artificial sequence
  Variant of native sequence
MAEITKADYPTAKSELIGGMYFSGNNGGATQTSSYSQDQLKKDLADRMIPAMSHRPDLFGLSGAPQSEDVLRNQYRMKFKDATTKFEGYTNSGNINTDVTVNHYEDARQVELLSYRNATPVNQNFNTPERTLKTSESFTYSNQEGVKLGVGSDTKVKASIPFIGEAEETIKITSEFSYNRTSSNTSSQEETTIFKSQPVVCIPGHTTQFVGTVQNAVFSGSFTGTAAVNGDIEWTMRLPGTDHDTVVNTANFAEGPQYQFQDAKGRMLYNIFKYSGMKLPSYVHLDDINHRVLIDDVKSTYSGIGGHYSRVEVKVFPNSRSNENAVTMPYAEYIQKVQNGTLQKELEQHYKKA

SEQ ID NO: 83 - protein, 487 aa, Bacillus sp.
MEHTYEIQESISQPLGAGGGSDPVVDVIEILADESIRLLNEHAFDSTIAKTITSLGGKALKDLYKDAHKNEVSWNNTFKNLTVAVTALIPYGGSFVSAMIGVIWPDEVIDNDNQATNIMDQFADLMNEKIENYDRQSIKVALKALQHELKLLDASLNGKSISESYYGSDSPEEHNRSRARIIHSKFKDLILQCSKEGYEEPELPLYTAVATTHILFLRCIEKHGLGPRLQFHNSSYNEFMKDLKEFPDKYIKHIKETYPQGSSKLSKEPTLVPKYYAETKGNKAFWMAVKRNTLIPQQNGKWYYLDQDGKMRTGWVKTGGFIMDDHGQLEMHQPDAYYYFSPNNIDKGQMVIGWFTDADGRTYYLTPEETQKFYKGQMVEEFVEIGKGKWFYFNPLDISRLAPNGYDNLPEAGKNMLKDTFGITKSVLRGEQRTEWVHYNGEWYYCSPEKNNRFDKGQMVTGEVAIKNSAGNIKTYHFNNDGVCTNP

SEQ ID NO: 84 - protein, 1239 aa, Bacillus sp.
MNQQHNNEYEIMSTGDMGYQPRYPFSNAPGAELQQMHYKDWMDMCADGESGKTFADLTVQEGVTIAVSIAAAILSVPFPVTAAGLSIISLLVPYWWPETAVTPGTPSAQVTWEKFMSAAENLSNTQIVASKRSDAIARWQGIQTLGRDYFQAQCDWLQDQNNELKKSKLREAFDDFEDYLKVSMPFFRAQGFEIPMLAMYAQAANMHLLLLREVVQNGVGWGFQQYEVDRYYSNTDPFLGNPGLLQLLEGYTDYCVQWYNAGLRQQYENNRYNWDAFNDFRRDMIIMVLDIVSLWPTYDPKRYPLPTKSQLTRTVYTDLVGFSGNSEYLQIDIERAEQALVQKPGLFTWLRELSFELGPLSRINFVRGRQIVFNYTGSSDRYEETKGNPGETRETVVIPAPDVGDDIWRISTQVNTYQIPNATFVRGWNFSFTQSLDQKIAWRTEYSPEIVMQGLSCHGPSVSSCNLCISNSPCRSITPNYSSPCDDKLVYSHRFSYLGAGLKSDLTTLIYFSYGWTHVSADANNLIDPKKITQIPAVKGDYLGRNARVIKGPGSTGGDLVQLSDGTERGTLGMKLTKPPGSHSYRVRIRYASNTRTQLEIIWGEDYDSVIVPATTTDITNLTYNKFGYFEIRVFSYNSSSEEEDLIRVDATGSFILDKIEFIPIEGSVDEYQANQDLEKARKAVNALFTGDAKSALKLSITDYIVDQAANFVECVSDEFHAQEKMILLDQVKFAKRLSQARNLLNYGDFESSDWSGENGWRTSPHVHVASNNPIFKGRYLHMPGAMSPQFSNNTYPTYAYQKVDESKLKSYTRYLVRGLVGNSKDLELLVERYGKDVHVEMDVPNDIQYTLPTNDCGGFDRCKPVSYQTGTSSYKSCGCKNNDTYQNGMHLSKSCGCKKDPHVFTYHIDTGCVDQEENLGLFFALKIVSENGMANIDNLEIIEAQPLKGEALARVKKREQKWKQEMAQKLLRTEKAVQAAKDALQTLFTNAQYNRLKFETLFPQIVHAEKLVQQIPYAYHPFLSGTLATVPGMNFEITQQLLAVIGNSRALYEKRNLVRNGTFSSGTGSWQVTEGVKVQPLQNTSVLVLSEWNHEASQQVRIDSNRGYVLRVTARKEGAGKGTVTMSDCADYTETLTFTSCDYNTVGSQTMTGGTLSGVVTKTLEIFPDTDRIRIDIGETEGTFQVESVELICMEQMEDDLYNMAGNVAEEMQVLQQSRSGSHTLDPLCNTRIGEFDC

SEQ ID NO: 85 - protein, 665 aa, Artificial sequence
  Variant of native sequence
MNQQHNNEYEIMSTGDMGYQPRYPFSNAPGAELQQMHYKDWMDMCADGESGKTFADLTVQEGVTIAVSIAAAILSVPFPVTAAGLSIISLLVPYWWPETAVTPGTPSAQVTWEKFMSAAENLSNTQIVASKRSDAIARWQGIQTLGRDYFQAQCDWLQDQNNELKKSKLREAFDDFEDYLKVSMPFFRAQGFEIPMLAMYAQAANMHLLLLREVVQNGVGWGFQQYEVDRYYSNTDPFLGNPGLLQLLEGYTDYCVQWYNAGLRQQYENNRYNWDAFNDFRRDMIIMVLDIVSLWPTYDPKRYPLPTKSQLTRTVYTDLVGFSGNSEYLQIDIERAEQALVQKPGLFTWLRELSFELGPLSRINFVRGRQIVFNYTGSSDRYEETKGNPGETRETVVIPAPDVGDDIWRISTQVNTYQIPNATFVRGWNFSFTQSLDQKIAWRTEYSPEIVMQGLSCHGPSVSSCNLCISNSPCRSITPNYSSPCDDKLVYSHRFSYLGAGLKSDLTTLIYFSYGWTHVSADANNLIDPKKITQIPAVKGDYLGRNARVIKGPGSTGGDLVQLSDGTERGTLGMKLTKPPGSHSYRVRIRYASNTRTQLEIIWGEDYDSVIVPATTTDITNLTYNKFGYFEIRVFSYNSSSEEEDLIRVDATGSFILDKIEFIPI

SEQ ID NO: 86 - protein, 367 aa, Bacillus sp.
MKNRSSKVALCTLSALMISTIATPSMTAFAAEVTSPNLITKEESSTISYIDIVQDRMKQRDIESKRTGKPINMQEQIIDGWFLARLWIFKDQNNNHQTNRFITWFKNNVASSKGYDSIAEQMGLKIEALSDMDISNVNYKSKLGDTIYNGISELTNYTGSVQKMKTDSFQRDYTKSQSTSVTNGLQVGFKVTAKSVITLAAGAGVDFETSVAYNLSSTTTETNTISDKFTVPSQEVTLPPGHKAIIKHDLRKMVYSGSHDLKGDLKVTFNDKELVQKFIYPNYRSIDLSDIRKAMIEIDKVNHVQPSDFYQLVGVKNHIKKGDTLYVDTPAEFNFNGANPYYRATFTEYDEDGNPVQAKPLTENYKI

SEQ ID NO: 87 - protein, 338 aa, Artificial sequence
  variant of native sequence
MAEVTSPNLITKEESSTISYIDIVQDRMKQRDIESKRTGKPINMQEQIIDGWFLARLWIFKDQNNNHQTNRFITWFKNNVASSKGYDSIAEQMGLKIEALSDMDISNVNYKSKLGDTIYNGISELTNYTGSVQKMKTDSFQRDYTKSQSTSVTNGLQVGFKVTAKSVITLAAGAGVDFETSVAYNLSSTTTETNTISDKFTVPSQEVTLPPGHKAIIKHDLRKMVYSGSHDLKGDLKVTFNDKELVQKFIYPNYRSIDLSDIRKAMIEIDKVNHVQPSDFYQLVGVKNHIKKGDTLYVDTPAEFNFNGANPYYRATFTEYDEDGNPVQAKPLTENYKI

SEQ ID NO: 88 - protein, 666 aa, Bacillus sp.
MNTNCFKWDQNSNTYIECIPDPMIYPKFLYNSTFSQKQEHLILDERISAQFRNACESETSDLNTLRSAVITASGLVWALAGFIPIYGTAIAAAGGVVNVLLPVLWPEDSTGEKQKLMCEVGSLINEKINQYAFASATAYLEGLQKLLTVYHQTVKDWRDPHNKKSWQKAAEDVREMFREVHSHFIVAMPMFKIEGFEVQLLPIYAEAATTHLALLQDVVKFGTEYGFDPQTINSFHVYLIKAIEEYTDHCIPTYTTGLEKAKKQTVNLEDPKKYPWINGRPLKDFQGIANWNRFNEFRRNMTLLVLDLVATWPTLNPQLYSRPTKIQISRELYTDIQGKDITGVFQNSAVTLETIERTFVRKPQLFTSLKQIELFYDTFFDVNNQRLKKLNGIKQTYLYAVDTINENLFGYQNKSLCKGNAGSILQTNLTIISSPDFFEIDSLEFLGEKGSGKCTVNNFTDFNHVFNNAIPSKAQATHSMSELKNIPRHNLSWLQGGISTDSNSKFIDYIGCVWTHPSVNSKNMLSPEHITQIAFVTAQKISDTATVIQGPGSTGGNLVKLQPRSHIIIAVTVPAGSQSYNIRIRCANKEQGSIFLITEDKSRIDFNIPDNLTYQDKLDYPSFQWVNPHSDFLIESSVTEDKKMVFYIESSNLEIILDKLEFVPID

SEQ ID NO: 89 - protein, 665 aa, Artificial sequence
  Variant of native sequence
MNTNCFKWDQNSNTYIECIPDPMIYPKFLYNSTFSQKQEHLILDERISAQFRNACESETSDLNTLRSAVITASGLVWALAGFIPIYGTAIAAAGGVVNVLLPVLWPEDSTGEKQKLMCEVGSLINEKINQYAFASATAYLEGLQKLLTVYHQTVKDWRDPHNKKSWQKAAEDVREMFREVHSHFIVAMPMFKIEGFEVQLLPIYAEAATTHLALLQDVVKFGTEYGFDPQTINSFHVYLIKAIEEYTDHCIPTYTTGLEKAKKQTVNLEDPKKYPWINGRPLKDFQGIANWNRFNEFRRNMTLLVLDLVATWPTLNPQLYSRPTKIQISRELYTDIQGKDITGVFQNSAVTLETIERTFVRKPQLFTSLKQIELFYDTFFDVNNQRLKKLNGIKQTYLYAVDTINENLFGYQNKSLCKGNAGSILQTNLTIISSPDFFEIDSLEFLGEKGSGKCTVNNFTDFNHVFNNAIPSKAQATHSMSELKNIPRHNLSWLQGGISTDSNSKFIDYIGCVWTHPSVNSKNMLSPEHITQIAFVTAQKISDTATVIQGPGSTGGNLVKLQPRSHIIIAVTVPAGSQSYNIRIRCANKEQGSIFLITEDKSRIDFNIPDNLTYQDKLDYPSFQWVNPHSDFLIESSVTEDKKMVFYIESSNLEIILDKLEFVPI

SEQ ID NO: 90 - protein, 279 aa, Bacillus sp.
VMHEFYLFGTGRFLQADFHNMDEQKFFISDDGTIAVKKDRKVWDATGGTSNGSPIIPYDYHGASNQKFTLERSGSVSVTKPTIGTLPPAPDFKTTDLNEILPDNTEPVITHATYLPYFMVKDPYYNNQQKMQNSPYYILVRRQYWEKITQRIVGAGESYKYEQKTGVSRTDQTSMTETTEIAIGADMGFMFKGFSVGLSTSITKTLSVTKSTSTTESTETTEIVTDSNPFMHTIARAKYMLINEYYVTRANGEKITSGDAAYWKVPNPSQTATRTIPRT

SEQ ID NO: 91 - protein, 278 aa, Artificial sequence
  Variant of native sequence
MHEFYLFGTGRFLQADFHNMDEQKFFISDDGTIAVKKDRKVWDATGGTSNGSPIIPYDYHGASNQKFTLERSGSVSVTKPTIGTLPPAPDFKTTDLNEILPDNTEPVITHATYLPYFMVKDPYYNNQQKMQNSPYYILVRRQYWEKITQRIVGAGESYKYEQKTGVSRTDQTSMTETTEIAIGADMGFMFKGFSVGLSTSITKTLSVTKSTSTTESTETTEIVTDSNPFMHTIARAKYMLINEYYVTRANGEKITSGDAAYWKVPNPSQTATRTIPRT

SEQ ID NO: 92 - protein, 952 aa, Bacillus sp.
MQKKMNDNVEQCVGQWNARNVLQSRITDFDVYNAIIERDYQFLLKEFESKPDFDEAGYILTKNILSGVIGVTGAVVGVLASGGTALFAGVALSLVSLAAGTYFDFSGPSATASAVWENIKEYTENYVENKINEDTYKNLKQELNGCARVIKLYLNYIDTKQYNGSIAEEYCRNALVYLEGRTEMFKHDTYKVLLLPLYAQFMRLHLLLYRDLVLFGEFWGGSLEVRDKDKKKLKELIKEYTEYAHTTYLEGLKKKQSVENPTWKSKCCGVDQNTVLQQQVLPLTKQWNTINRYKQGMQLSVLDIVAQFPTIDPVDYRIGTNLKQSREVYSSIIGAIIKPKDNIGTTTTPTIVNSAKEIDKILAATNKYEGELIDVRIEEGDIKQWKLSGEPYNLKAISKIQSYVDKMTDIAMMKEYNTKLPVSNVTKAWFPSSHMMPLDIVGACCEQANGLVDYFYGGSSLDAIPSDKIKCNIIPKNHKLSSVHLFGKFNTEREVSVAPSESMVSTGLICGFRQRELDPRHIVLPNLIIQIPAEMNRNEGIKGFRSSPEDITAQNTMYAITGGSYLEYDIFGFENVTYDCKIRLYLSYKGNAGSSISIQVDGEDKGRIMLQPTEQNPNAIKGSNGSYILTEEIDLTFEKERNIIKLVYNSNGKNSVCIDRVEIVPVKTKTMIGDKKGQIIFTTHSDGTLEAAVMKKGQISNSSSVWRVFVGGQDTGFSFKGDYEADYIKTIFNQEFFEKTDKYKIPGITLNVIEFTQNIISMGIIPIDKDKKKMLELVKVDAQKNTQIIMRKMEGADLTQKIEKNYNIFAGGKLVYQCKKGTKFKTVMDAFNALNIRAFNARIREENEEMNPTEIADDIINNLFQSLPSPGEGTVKPNVSSYDTRVAKNALRWCKRTNKKLPVWGTMNLNDAEFLAFNKESQMKDACYTNEDQLDDMIIRKRSKNCKLEGEI

SEQ ID NO: 93 - protein, 666 aa, Artificial sequence
  Variant of native sequence
MQKKMNDNVEQCVGQWNARNVLQSRITDFDVYNAIIERDYQFLLKEFESKPDFDEAGYILTKNILSGVIGVTGAVVGVLASGGTALFAGVALSLVSLAAGTYFDFSGPSATASAVWENIKEYTENYVENKINEDTYKNLKQELNGCARVIKLYLNYIDTKQYNGSIAEEYCRNALVYLEGRTEMFKHDTYKVLLLPLYAQFMRLHLLLYRDLVLFGEFWGGSLEVRDKDKKKLKELIKEYTEYAHTTYLEGLKKKQSVENPTWKSKCCGVDQNTVLQQQVLPLTKQWNTINRYKQGMQLSVLDIVAQFPTIDPVDYRIGTNLKQSREVYSSIIGAIIKPKDNIGTTTTPTIVNSAKEIDKILAATNKYEGELIDVRIEEGDIKQWKLSGEPYNLKAISKIQSYVDKMTDIAMMKEYNTKLPVSNVTKAWFPSSHMMPLDIVGACCEQANGLVDYFYGGSSLDAIPSDKIKCNIIPKNHKLSSVHLFGKFNTEREVSVAPSESMVSTGLICGFRQRELDPRHIVLPNLIIQIPAEMNRNEGIKGFRSSPEDITAQNTMYAITGGSYLEYDIFGFENVTYDCKIRLYLSYKGNAGSSISIQVDGEDKGRIMLQPTEQNPNAIKGSNGSYILTEEIDLTFEKERNIIKLVYNSNGKNSVCIDRVEIVPV

SEQ ID NO: 94 - protein, 605 aa, Bacillus sp.
LKKERILNDMNGKELEVFLGAFELGVRANSNLIIDVQNTSSGANLHLQERQNVRNSKWRVELYTGVWNPENLDVFVIYNVNDKQNVITFDDYNQALTLRPIEEYNLGQLWEIYDAGEEGWRFRSFEVPSLVIGTRDQKTAVGTDITAYNDNDIQTQLWTLSYDRKPAEGLLDNQNARYSIRTMVDSTFGIVNRDHTAQAHKITNLPDRKYQVKWDKNKQAYTIIQEVNNRKLALSFDGKSEEIVFRDFDAEELMQYWNIKYVKDKAYIIESLTRPSKCIDIWSDLGKILLFQNHGGTNQQWEFTMKHSDSIFDNQRVQFVPSNNSYYAATQTIVVDPQEGPQTRLSLDENADYKTTQGFLLKYDQTRDAYQIWNLDSSQILAWDYRNDSKRTTVFIHPNQNKAEHYWVLEELENQLFHIVNYANTGKVLDLEIGQTKNGSIILWDKKQDQISGNQKFYISTFELYDQYDGKGEKLLFTPNSQWNDKISSVRVPPYSSVRFWEHGGYSGKLKTIDNDSDKAKVFNLTDFNNIASSYLLYLNARRPNVLKNENTKDSGSIYNEHNPDSTYEIDREGNNITLNFYESTCNIFLNDDPHAEYPFHAEEK

SEQ ID NO: 95 - protein, 455 aa, Bacillus sp.
MKQIHNGSCSCSCQQRSFDNAPEKNGVEINNSVQYDMNGLQSTYNGINSCVPPVLNLPVESTIFQTINAGGSSNNVCLDSWNVRAGTDLRNGSPNWACRIVPNDYQVLIAPFNNNVDTQFFVFYALDDGNFIIASLDHGRVFDKGDNDDSIVARLYTGSNNQRFTKIRTSGNDFILRRNGRMVGGCDGFVFLNNNSVADTLSFNTTLNSPTARLINDLRLSCLTSLNPLPQLTGFNDSGPSPNEAPRAIRGSWLIPCIFINDVIPLRNRIKQSPYYILEYREYWHRLWSEILQSGGVTTGVETTGIDDNAQSDMRDTVDITIGADWNLRFWDLSTPFRQQILSGLNLLNSTSNTNLGSTENMYRYVNFNPQQVRYSRFSKGYEYQLRRLDGTIVRTWRAIDNRSMYLQTFPVNMGLELTETKIISADNSYDLSTWKTPMKIRDGEIKTKNKNCVL

SEQ ID NO: 96 - protein, 496 aa, Bacillus sp.
VAMPMFRITEFEIQLLPIYTKAATFHLLILNDVIKFGREYGFDKATVAGFQKDFMEVIEEYTDHCSKTYQQGLGKAKKMKADLTDEKKYPWTIMNFERYQSIEDWNLFNEYRRTMTLLVLDLVAIWPTLNPTYYPSMLKVPLTREVYTNIQGAYIPYTDSLTSEKIENTIVRKPQLFTLLNNIIICHLKKNEELCGAHLQYSRIGSSDILQYSQGFDGYYSCQIQQFPINETKVWFNGIDKLSRVDFSRIKDKQLFTLYQCGQYYAPEAPSATKNPIFSNAVPEFSNNMFEIQKTIPDFEIPQHNLSWISLGNASKPTDKTIDYIGFGWIHPSIDINNTVASNQITQIPAVMANNLSGQASVIDGPNTTGGDLVELIFDPKEITKTAIELKILLPSVVNQEYRIRIRYASDTDTVLNTIFRQNNTDVTETNMISKALPELDASLSFKSFNYAKLMSPRIINNTMNQTCILRIENIGIQNQFSRIIIDKIEFIPVFL

SEQ ID NO: 97 - protein, 496 aa, Artificial sequence
  Variant of native sequence
MAMPMFRITEFEIQLLPIYTKAATFHLLILNDVIKFGREYGFDKATVAGFQKDFMEVIEEYTDHCSKTYQQGLGKAKKMKADLTDEKKYPWTIMNFERYQSIEDWNLFNEYRRTMTLLVLDLVAIWPTLNPTYYPSMLKVPLTREVYTNIQGAYIPYTDSLTSEKIENTIVRKPQLFTLLNNIIICHLKKNEELCGAHLQYSRIGSSDILQYSQGFDGYYSCQIQQFPINETKVWFNGIDKLSRVDFSRIKDKQLFTLYQCGQYYAPEAPSATKNPIFSNAVPEFSNNMFEIQKTIPDFEIPQHNLSWISLGNASKPTDKTIDYIGFGWIHPSIDINNTVASNQITQIPAVMANNLSGQASVIDGPNTTGGDLVELIFDPKEITKTAIELKILLPSVVNQEYRIRIRYASDTDTVLNTIFRQNNTDVTETNMISKALPELDASLSFKSFNYAKLMSPRIINNTMNQTCILRIENIGIQNQFSRIIIDKIEFIPVFL

SEQ ID NO: 98 - protein, 494 aa, Artificial sequence
  Variant of native sequence
VAMPMFRITEFEIQLLPIYTKAATFHLLILNDVIKFGREYGFDKATVAGFQKDFMEVIEEYTDHCSKTYQQGLGKAKKMKADLTDEKKYPWTIMNFERYQSIEDWNLFNEYRRTMTLLVLDLVAIWPTLNPTYYPSMLKVPLTREVYTNIQGAYIPYTDSLTSEKIENTIVRKPQLFTLLNNIIICHLKKNEELCGAHLQYSRIGSSDILQYSQGFDGYYSCQIQQFPINETKVWFNGIDKLSRVDFSRIKDKQLFTLYQCGQYYAPEAPSATKNPIFSNAVPEFSNNMFEIQKTIPDFEIPQHNLSWISLGNASKPTDKTIDYIGFGWIHPSIDINNTVASNQITQIPAVMANNLSGQASVIDGPNTTGGDLVELIFDPKEITKTAIELKILLPSVVNQEYRIRIRYASDTDTVLNTIFRQNNTDVTETNMISKALPELDASLSFKSFNYAKLMSPRIINNTMNQTCILRIENIGIQNQFSRIIIDKIEFIPV

SEQ ID NO: 99 - protein, 951 aa, Bacillus sp.
MIMQMVTKAMTPKLGALPDFIDDFNGIFGFMDNITGVMSTIFGVDTGDSSIDNVLNNQELLQEMLDQMSTMQSSIQDILEQQGISADIEKQILALTTDLATSINTELGKIEGILNTYLPAISNMLSNIYEQTSVIDQKVDKLLALMTFALKELDYIKDNVVLNSSIVEITPHVQKLVYVNKKFLSLTRGFLQGEDVSIDNMQEIQEWAKSILATEMNSFEFSVDTLHNIIIGDNLYKRSALKTFSDVLLDDADQYGDFGTPLAKFYTFFSSLATLQINAYLCLTFARKVLGLSEIDYQVTMQDRIEQQNQMFVNLIQDKNYSNALEITGIYPMSLDWGNCKSTDLQADDGYALIGLEFFMDNGIYKAKAYQGKIGKNFSVSADTVTEIISDDLSTVFNDMTNDNPELYVVYPLSGELTGPPNTIITRIGFGTKYDKTRESSVQAFAYIDADFSPYDYISGTISKEGTQTISLEGNDPKNQCYSMWPIGLIGDLYMTPLKSLSLNVDDSSAYGTILNMSGESYFSTILSREYNTNFILFPYTNNSSPIVENLIQNGDFEDGDKYWEVVSGTAVIAESEGINGSKAMKLENGTIEQKLNLKPYTNYEFTAYAKGRSVNLLIQDNTQAILAEGYLDSTIYKQMKFKFKTGMDSSNFIVRATSPQEVLVDNIKVCETTQANNLIECGDFNHYEIDEEDFKILLYPNLWEPYDGGGIASLGGLNDSYSLKIINSGGANQKVQLKANTNYILTAYVKVDHPTTTAQIGCGSNQVSCNSTSYTPLKLKFKTGEDPSTTESSVYCSNSNDSGTVWADNFVLYEAPNLIINGDFEQFDQSSWNFSPSEGGSIYLQSGLGMSRSNAVVIHGKNEKISQKIPLKPFTKYRLTAYVRVSKGSLAYIGYGEYNCACAVDDFRQAHVEFTTGANPMQSDDAIYLDSFASGYTVADNFELYELDQI

SEQ ID NO: 100 - protein, 949 aa, Artificial sequence
  Variant of native sequence
MQMVTKAMTPKLGALPDFIDDFNGIFGFMDNITGVMSTIFGVDTGDSSIDNVLNNQELLQEMLDQMSTMQSSIQDILEQQGISADIEKQILALTTDLATSINTELGKIEGILNTYLPAISNMLSNIYEQTSVIDQKVDKLLALMTFALKELDYIKDNVVLNSSIVEITPHVQKLVYVNKKFLSLTRGFLQGEDVSIDNMQEIQEWAKSILATEMNSFEFSVDTLHNIIIGDNLYKRSALKTFSDVLLDDADQYGDFGTPLAKFYTFFSSLATLQINAYLCLTFARKVLGLSEIDYQVTMQDRIEQQNQMFVNLIQDKNYSNALEITGIYPMSLDWGNCKSTDLQADDGYALIGLEFFMDNGIYKAKAYQGKIGKNFSVSADTVTEIISDDLSTVFNDMTNDNPELYVVYPLSGELTGPPNTIITRIGFGTKYDKTRESSVQAFAYIDADFSPYDYISGTISKEGTQTISLEGNDPKNQCYSMWPIGLIGDLYMTPLKSLSLNVDDSSAYGTILNMSGESYFSTILSREYNTNFILFPYTNNSSPIVENLIQNGDFEDGDKYWEVVSGTAVIAESEGINGSKAMKLENGTIEQKLNLKPYTNYEFTAYAKGRSVNLLIQDNTQAILAEGYLDSTIYKQMKFKFKTGMDSSNFIVRATSPQEVLVDNIKVCETTQANNLIECGDFNHYEIDEEDFKILLYPNLWEPYDGGGIASLGGLNDSYSLKIINSGGANQKVQLKANTNYILTAYVKVDHPTTTAQIGCGSNQVSCNSTSYTPLKLKFKTGEDPSTTESSVYCSNSNDSGTVWADNFVLYEAPNLIINGDFEQFDQSSWNFSPSEGGSIYLQSGLGMSRSNAVVIHGKNEKISQKIPLKPFTKYRLTAYVRVSKGSLAYIGYGEYNCACAVDDFRQAHVEFTTGANPMQSDDAIYLDSFASGYTVADNFELYELDQI

SEQ ID NO: 101 - protein, 802 aa, Bacillus sp.
VQFINKSYNQTKKLINQALSQEVSNRISQAIAGLYANLARFNQTIAVYETLQVSTIIADIESIQAVFDNQIPQLIDPGFLALTLPLYVQGINLNLMFYKTVLDHADQMKIPADERNLYRNALIAKIKSASSQVYTYFKQVRYTDDATRVVTRQTLYTHCLDYVAMWPTFNPDLYPVSADLEQTRVLSSPITGPTTNGAPHGPFSDGLGFDSHLELTNISYWQGDRVDYVNQNFQNGSSISGGSGNGGTRHDVPSSRANPIASAWLNVPENNYQFFQYQMYNTPIDYTKPQNPFLAPPGHKLHRLYLASDPSFGGRVGNSMALFIQDSIFPENIIGKVDTDLGVTRIKGIPFEKSPSTSTFTYNSEPLNGAEAVKLGVGQSLALPITNVATGSYEVRIRYASTTAATIFINLDVGGGHPIYKTVVLPATSINDSTGIEGANGTYALFKIQAADIPAGNFNVYVTNVNGANLFLDRIEFVRAGPSGSGNADDIPDTPFDLTNTIPQTIWKGNNTNNHLTSLNGVVTTDTVVNIALRLQGSFVGNSKYYSKGSFDFVRDYGSDIQYLQFDEITLAAAAWGAEVKGTIRGQVNISAKSFNTEEDLATITQVVNTLFITDTQLAPTATDYWIDQVYLKVKALSDDMFGEEKDKLRQRVARAKQINMMKNKLVGSSFQSVTHWQFSSDVALLADNPLFAGKYVVLPPSTYPDTRPSYAYQKVDESKLKPYTRYIVRGFIGQAQDLALMVSRYGKEIDTTLTVPYQEALPVSPGSEIYEQEYTQEEMKRLEGIADALNKITNQCWWLLK

SEQ ID NO: 102 - protein, 802 aa, Artificial sequence
  Variant of native sequence
MQFINKSYNQTKKLINQALSQEVSNRISQAIAGLYANLARFNQTIAVYETLQVSTIIADIESIQAVFDNQIPQLIDPGFLALTLPLYVQGINLNLMFYKTVLDHADQMKIPADERNLYRNALIAKIKSASSQVYTYFKQVRYTDDATRVVTRQTLYTHCLDYVAMWPTFNPDLYPVSADLEQTRVLSSPITGPTTNGAPHGPFSDGLGFDSHLELTNISYWQGDRVDYVNQNFQNGSSISGGSGNGGTRHDVPSSRANPIASAWLNVPENNYQFFQYQMYNTPIDYTKPQNPFLAPPGHKLHRLYLASDPSFGGRVGNSMALFIQDSIFPENIIGKVDTDLGVTRIKGIPFEKSPSTSTFTYNSEPLNGAEAVKLGVGQSLALPITNVATGSYEVRIRYASTTAATIFINLDVGGGHPIYKTVVLPATSINDSTGIEGANGTYALFKIQAADIPAGNFNVYVTNVNGANLFLDRIEFVRAGPSGSGNADDIPDTPFDLTNTIPQTIWKGNNTNNHLTSLNGVVTTDTVVNIALRLQGSFVGNSKYYSKGSFDFVRDYGSDIQYLQFDEITLAAAAWGAEVKGTIRGQVNISAKSFNTEEDLATITQVVNTLFITDTQLAPTATDYWIDQVYLKVKALSDDMFGEEKDKLRQRVARAKQINMMKNKLVGSSFQSVTHWQFSSDVALLADNPLFAGKYVVLPPSTYPDTRPSYAYQKVDESKLKPYTRYIVRGFIGQAQDLALMVSRYGKEIDTTLTVPYQEALPVSPGSEIYEQEYTQEEMKRLEGIADALNKITNQCWWLLK

SEQ ID NO: 103 - protein, 480 aa, Artificial sequence
  Variant of native sequence
MQFINKSYNQTKKLINQALSQEVSNRISQAIAGLYANLARFNQTIAVYETLQVSTIIADIESIQAVFDNQIPQLIDPGFLALTLPLYVQGINLNLMFYKTVLDHADQMKIPADERNLYRNALIAKIKSASSQVYTYFKQVRYTDDATRVVTRQTLYTHCLDYVAMWPTFNPDLYPVSADLEQTRVLSSPITGPTTNGAPHGPFSDGLGFDSHLELTNISYWQGDRVDYVNQNFQNGSSISGGSGNGGTRHDVPSSRANPIASAWLNVPENNYQFFQYQMYNTPIDYTKPQNPFLAPPGHKLHRLYLASDPSFGGRVGNSMALFIQDSIFPENIIGKVDTDLGVTRIKGIPFEKSPSTSTFTYNSEPLNGAEAVKLGVGQSLALPITNVATGSYEVRIRYASTTAATIFINLDVGGGHPIYKTVVLPATSINDSTGIEGANGTYALFKIQAADIPAGNFNVYVTNVNGANLFLDRIEFVRA

SEQ ID NO: 104 - protein, 480 aa, Artificial sequence
  Variant of native sequence
VQFINKSYNQTKKLINQALSQEVSNRISQAIAGLYANLARFNQTIAVYETLQVSTIIADIESIQAVFDNQIPQLIDPGFLALTLPLYVQGINLNLMFYKTVLDHADQMKIPADERNLYRNALIAKIKSASSQVYTYFKQVRYTDDATRVVTRQTLYTHCLDYVAMWPTFNPDLYPVSADLEQTRVLSSPITGPTTNGAPHGPFSDGLGFDSHLELTNISYWQGDRVDYVNQNFQNGSSISGGSGNGGTRHDVPSSRANPIASAWLNVPENNYQFFQYQMYNTPIDYTKPQNPFLAPPGHKLHRLYLASDPSFGGRVGNSMALFIQDSIFPENIIGKVDTDLGVTRIKGIPFEKSPSTSTFTYNSEPLNGAEAVKLGVGQSLALPITNVATGSYEVRIRYASTTAATIFINLDVGGGHPIYKTVVLPATSINDSTGIEGANGTYALFKIQAADIPAGNFNVYVTNVNGANLFLDRIEFVRA

SEQ ID NO: 105 - protein, 701 aa, Bacillus sp.
MSSYNKNQLETLKELLSNANVSITCPLHPLAKEPTAVLQGMNYKDWLVMSEGENSLRKPENFDSETIQNALIGTLAVIGTIAAFIAAPVTGGASLVALGSAVLMETIPFYWGLAESEDPTIEEKTRFDDIMKATEKTINSAIEKVVKTKAESELTSLRDVIKYYKKALDLWEKNKDNQNAKKEVSSRFRAAHVAFIGAMSQFKMPGYELLMLPIYAIAANYHLLLLRDGLICEKEWNISENVTEDFYYKEYQKWTSEYIDHCTAWYQKGLEDIKDNKEKNWVDYNSYRNNMTIMVLDLIALFPSYDARRYNNMNVKLETHTRTLYSNPLKFSKGPRIYDDEKVYTHKPQLFSSLSHLELHTSITNLGSDGIEFLSGIRKKYQLTEKESYRTEFEGKPSNQEKMHEIPFKKDESEFYSLYELSAEGKGFKDPSRGLLIQKMTFNNEEGKKFEYSVDKFGNGALEKESFSITNPDDLLIDQKARHVLSNIIFVPEKNSSSEQLQARAYSFAWTSEQISPYNLVTDGTKNKDGSISYRITQVPAVKASRLKSSQKTSHIEVISGPGFTGGNLVRCAIKKTASSTGLTEISIEFPITFHHVKTDKYRVRMNYAADHTKLITLVGGNNPINGIIENTFDAKDTGRPLKYNNFKMMEFNIETNFKDEEKQKIITLKLTYEDEDQAIADGKIAQLWIDRLEFIPVPAK

SEQ ID NO: 106 - protein, 698 aa, Artificial sequence
  Variant of native sequence
MSSYNKNQLETLKELLSNANVSITCPLHPLAKEPTAVLQGMNYKDWLVMSEGENSLRKPENFDSETIQNALIGTLAVIGTIAAFIAAPVTGGASLVALGSAVLMETIPFYWGLAESEDPTIEEKTRFDDIMKATEKTINSAIEKVVKTKAESELTSLRDVIKYYKKALDLWEKNKDNQNAKKEVSSRFRAAHVAFIGAMSQFKMPGYELLMLPIYAIAANYHLLLLRDGLICEKEWNISENVTEDFYYKEYQKWTSEYIDHCTAWYQKGLEDIKDNKEKNWVDYNSYRNNMTIMVLDLIALFPSYDARRYNNMNVKLETHTRTLYSNPLKFSKGPRIYDDEKVYTHKPQLFSSLSHLELHTSITNLGSDGIEFLSGIRKKYQLTEKESYRTEFEGKPSNQEKMHEIPFKKDESEFYSLYELSAEGKGFKDPSRGLLIQKMTFNNEEGKKFEYSVDKFGNGALEKESFSITNPDDLLIDQKARHVLSNIIFVPEKNSSSEQLQARAYSFAWTSEQISPYNLVTDGTKNKDGSISYRITQVPAVKASRLKSSQKTSHIEVISGPGFTGGNLVRCAIKKTASSTGLTEISIEFPITFHHVKTDKYRVRMNYAADHTKLITLVGGNNPINGIIENTFDAKDTGRPLKYNNFKMMEFNIETNFKDEEKQKIITLKLTYEDEDQAIADGKIAQLWIDRLEFIPV

SEQ ID NO: 107 - protein, 1140 aa, Bacillus sp.
MINKQVGGLLMNQTDVRNAINVAELEGVKKVRERYPDMKVSDFPNRDIVISNTELHATLQPLLNRPIYTGISGTHMIENKHFLRQTSNSDLQNITLAECQDLYGNVNPQKSLDIDPESGLAASLGIISFLLSISNPVAAAVAGIASVIVPILWPTAVQDPNVVWQSMMANAEALIDAKLDQVVKNTAIRKLDGLKDVMNEYYKAITRLQNDPTDPVEQMAVRSQYDTLDSLFRYSMPQFSVENYELQLLPVYTEAANLHLLLIRDAVNYGSQWGMTQAKLDEEYSDLKERTNVYTNYCVHWFNTGLQRLASTTSPSYKPANMWDCTKYPWVAYNQSDWSARNPSRNCNSTLLTSTCDEQTNKYHLAENSRGMGSYRDSKGEYQGLENWNLYNDFRRDMTIMVLDIISVWPTYDPKLYPMGIKSELTRTLYTPIRGTTYRSDGNQNTLSAIENRMIQQPGLFTWLDGLSFQQINIPGDWVWSAGDLLTGGSQYRNYTLGNSFENQFGKTGTLPIRTVDLPPNSPITKVITRQWFEPREIELYKGNTHTFTLGTITERYPFFTEGCSGYPKTCIYDPARRENQVPKAVDPYNPSAPMTQWKDSHLLSYFKYEPIRSDSPFGYPDEGQIGAVAFGWTHTGVDPNNLIDPGKITQIPAVKGYQLGGNAKVVPGPGSTGGDLVQLVPGGVMFIRVTGQVQKGYQLRIRYASTGTNRLFVDRYMDGSSEADYTVPVNLPPTYSGESLNFNSFGYATMEEPLPPLIDTSSATWKMEFSNFGNSPIIIDKIEFIPIEGSVEEFEADQGLEKARKAVNALYTSDAKNALKLNVTDYAVDQAANLVECISEDFHAQEKMILLDQIRVAKRLSQARNLLHHGDFESPDWSGENGWKTSHHVSVRADIPIFKGRYLHMSGATSTQFSSNTYPTYVYQKVDESKLKSYTRYLVRGFVGNSKDLELLVERYGKDVHVEMDVPSDITYSLPMNECGGFDRCKPASYPTRPPHTCTCKENAVAHTDCLCQDKGNRTSTNRDSNVPTDSAVYTNEFHAHQSCGCRNKNSDMYQSGTHPQKSCGCKDPHVFTYHIDTGCVDMEENLGLFFALKIASESGVANIDNLEIIEVQPLTGEALARVKKREQKWKQEMAQKRL

SEQ ID NO: 108 - protein, 1130 aa, Artificial sequence
  Variant of native sequence
MNQTDVRNAINVAELEGVKKVRERYPDMKVSDFPNRDIVISNTELHATLQPLLNRPIYTGISGTHMIENKHFLRQTSNSDLQNITLAECQDLYGNVNPQKSLDIDPESGLAASLGIISFLLSISNPVAAAVAGIASVIVPILWPTAVQDPNVVWQSMMANAEALIDAKLDQVVKNTAIRKLDGLKDVMNEYYKAITRLQNDPTDPVEQMAVRSQYDTLDSLFRYSMPQFSVENYELQLLPVYTEAANLHLLLIRDAVNYGSQWGMTQAKLDEEYSDLKERTNVYTNYCVHWFNTGLQRLASTTSPSYKPANMWDCTKYPWVAYNQSDWSARNPSRNCNSTLLTSTCDEQTNKYHLAENSRGMGSYRDSKGEYQGLENWNLYNDFRRDMTIMVLDIISVWPTYDPKLYPMGIKSELTRTLYTPIRGTTYRSDGNQNTLSAIENRMIQQPGLFTWLDGLSFQQINIPGDWVWSAGDLLTGGSQYRNYTLGNSFENQFGKTGTLPIRTVDLPPNSPITKVITRQWFEPREIELYKGNTHTFTLGTITERYPFFTEGCSGYPKTCIYDPARRENQVPKAVDPYNPSAPMTQWKDSHLLSYFKYEPIRSDSPFGYPDEGQIGAVAFGWTHTGVDPNNLIDPGKITQIPAVKGYQLGGNAKVVPGPGSTGGDLVQLVPGGVMFIRVTGQVQKGYQLRIRYASTGTNRLFVDRYMDGSSEADYTVPVNLPPTYSGESLNFNSFGYATMEEPLPPLIDTSSATWKMEFSNFGNSPIIIDKIEFIPIEGSVEEFEADQGLEKARKAVNALYTSDAKNALKLNVTDYAVDQAANLVECISEDFHAQEKMILLDQIRVAKRLSQARNLLHHGDFESPDWSGENGWKTSHHVSVRADIPIFKGRYLHMSGATSTQFSSNTYPTYVYQKVDESKLKSYTRYLVRGFVGNSKDLELLVERYGKDVHVEMDVPSDITYSLPMNECGGFDRCKPASYPTRPPHTCTCKENAVAHTDCLCQDKGNRTSTNRDSNVPTDSAVYTNEFHAHQSCGCRNKNSDMYQSGTHPQKSCGCKDPHVFTYHIDTGCVDMEENLGLFFALKIASESGVANIDNLEIIEVQPLTGEALARVKKREQKWKQEMAQKRL

SEQ ID NO: 109 - protein, 778 aa, Artificial sequence
  Variant of native sequence
MNQTDVRNAINVAELEGVKKVRERYPDMKVSDFPNRDIVISNTELHATLQPLLNRPIYTGISGTHMIENKHFLRQTSNSDLQNITLAECQDLYGNVNPQKSLDIDPESGLAASLGIISFLLSISNPVAAAVAGIASVIVPILWPTAVQDPNVVWQSMMANAEALIDAKLDQVVKNTAIRKLDGLKDVMNEYYKAITRLQNDPTDPVEQMAVRSQYDTLDSLFRYSMPQFSVENYELQLLPVYTEAANLHLLLIRDAVNYGSQWGMTQAKLDEEYSDLKERTNVYTNYCVHWFNTGLQRLASTTSPSYKPANMWDCTKYPWVAYNQSDWSARNPSRNCNSTLLTSTCDEQTNKYHLAENSRGMGSYRDSKGEYQGLENWNLYNDFRRDMTIMVLDIISVWPTYDPKLYPMGIKSELTRTLYTPIRGTTYRSDGNQNTLSAIENRMIQQPGLFTWLDGLSFQQINIPGDWVWSAGDLLTGGSQYRNYTLGNSFENQFGKTGTLPIRTVDLPPNSPITKVITRQWFEPREIELYKGNTHTFTLGTITERYPFFTEGCSGYPKTCIYDPARRENQVPKAVDPYNPSAPMTQWKDSHLLSYFKYEPIRSDSPFGYPDEGQIGAVAFGWTHTGVDPNNLIDPGKITQIPAVKGYQLGGNAKVVPGPGSTGGDLVQLVPGGVMFIRVTGQVQKGYQLRIRYASTGTNRLFVDRYMDGSSEADYTVPVNLPPTYSGESLNFNSFGYATMEEPLPPLIDTSSATWKMEFSNFGNSPIIIDKIEFIPI

SEQ ID NO: 110 - protein, 788 aa, Artificial sequence
  Variant of native sequence
MINKQVGGLLMNQTDVRNAINVAELEGVKKVRERYPDMKVSDFPNRDIVISNTELHATLQPLLNRPIYTGISGTHMIENKHFLRQTSNSDLQNITLAECQDLYGNVNPQKSLDIDPESGLAASLGIISFLLSISNPVAAAVAGIASVIVPILWPTAVQDPNVVWQSMMANAEALIDAKLDQVVKNTAIRKLDGLKDVMNEYYKAITRLQNDPTDPVEQMAVRSQYDTLDSLFRYSMPQFSVENYELQLLPVYTEAANLHLLLIRDAVNYGSQWGMTQAKLDEEYSDLKERTNVYTNYCVHWFNTGLQRLASTTSPSYKPANMWDCTKYPWVAYNQSDWSARNPSRNCNSTLLTSTCDEQTNKYHLAENSRGMGSYRDSKGEYQGLENWNLYNDFRRDMTIMVLDIISVWPTYDPKLYPMGIKSELTRTLYTPIRGTTYRSDGNQNTLSAIENRMIQQPGLFTWLDGLSFQQINIPGDWVWSAGDLLTGGSQYRNYTLGNSFENQFGKTGTLPIRTVDLPPNSPITKVITRQWFEPREIELYKGNTHTFTLGTITERYPFFTEGCSGYPKTCIYDPARRENQVPKAVDPYNPSAPMTQWKDSHLLSYFKYEPIRSDSPFGYPDEGQIGAVAFGWTHTGVDPNNLIDPGKITQIPAVKGYQLGGNAKVVPGPGSTGGDLVQLVPGGVMFIRVTGQVQKGYQLRIRYASTGTNRLFVDRYMDGSSEADYTVPVNLPPTYSGESLNFNSFGYATMEEPLPPLIDTSSATWKMEFSNFGNSPIIIDKIEFIPI

SEQ ID NO: 111 - protein, 1205 aa, Bacillus sp.
MATLSDLYPVNVLSSSAYEKYNLIPSEAANMDEIFKQIKDAWGKYGSVPKELLTQAWNYYNNGTIDYLALVKSVISLAGVIPEVSAFVPFANQFLDFIWPKIFGDSTSTTPDLFEQLKPQIKALVDEAIYKANEQLLADTAKGFEGVVQLYNEKVVQVKKAPTVQHVLELHNQIDAVRNFFLHDAPHFVSSGTVAIPHLTMMVTLQLMVLRDAILSDSSWNYTDDDKDTLLNGALGFRQILNTYSKWVFDTLTEELNTNYATFDTVDKWNARNNFLTIVTLTSLDLVALWPTLDPELYPVNTDIDFTRTLKSPILQPVWNPNPFIVPNDFLSYQGELSSMQFSNQYDTAGYSSVLSGIINRLDRSNYTTRELNYGYGRTVYGVNIDKPPIPVKSTNPVIKTSLTNTSYNRIEASAFTATFADGSDDGLVVQGNYGAAWDHAYTASDTAPSQNKLNYFYTSTKDPLLWNFVNVYIPIDTPAGNIIGQPDDTGKLSIKGFPAEKGFSDSGNLEYVNEPLNGAAAVKLTNKQVFRLALVNQISQSYAIRIRYASNATANNWFHLYTPSGSPINGHLIFPATNTDATMSVQGENGRYGLVTATESVTIPAGGAEIIIENLNQTDLFIDRIEFVPVPTNYYFQVSANLQPFQEQDVWTGDGSAGDYEIQSDLGLSSSRGMVLFYNGDDRVATGYWQFDSRSESTVPTNFNRISLISYASDSQLVVLDFHLKKQNNQKFEIEQDLQNITNQVNELFTSSTQDTLVSDVSDYWIDQVVMKIDVLSDEVFGKEKTELRKRANKAKQLSKTRNLLITGNFENLNDWYIGRNVVRVGNHELFKGDYLLLPPPSLFPSYAYQIIEEFKLKPNTRYTVSGFIAQAEGLELIISRYGQEIQKVFHVPEGTAYPLTSEEIANCCAPSSNPNATDSHFFNYSIDIGSLQPEANLGIEVGFRIVKPTGFAKLSNIEIREERALTMSEISSVQRTEQTWRRKYNQERTEVNTVIQPVIDQINALYENEDWNGTIRSTISYADVQDIVLPTLPKEKHWFMDDRTGEHASIRQRFQRALDRAFQQLEARNLFHNGHFTNGLTDWTIEGNTAMITLETGQQVLQLEHWDASAAQSIEIANFNQNQEYQLRVYAKGKGKITIKHGVDGERIEVMNIDSTNFIKQHSAPLKFDTATIEVYVMSEDGVLQVDSIELIKFSVEDTPDNN

SEQ ID NO: 112 - protein, 631 aa, Artificial sequence
  Variant of native sequence
MATLSDLYPVNVLSSSAYEKYNLIPSEAANMDEIFKQIKDAWGKYGSVPKELLTQAWNYYNNGTIDYLALVKSVISLAGVIPEVSAFVPFANQFLDFIWPKIFGDSTSTTPDLFEQLKPQIKALVDEAIYKANEQLLADTAKGFEGVVQLYNEKVVQVKKAPTVQHVLELHNQIDAVRNFFLHDAPHFVSSGTVAIPHLTMMVTLQLMVLRDAILSDSSWNYTDDDKDTLLNGALGFRQILNTYSKWVFDTLTEELNTNYATFDTVDKWNARNNFLTIVTLTSLDLVALWPTLDPELYPVNTDIDFTRTLKSPILQPVWNPNPFIVPNDFLSYQGELSSMQFSNQYDTAGYSSVLSGIINRLDRSNYTTRELNYGYGRTVYGVNIDKPPIPVKSTNPVIKTSLTNTSYNRIEASAFTATFADGSDDGLVVQGNYGAAWDHAYTASDTAPSQNKLNYFYTSTKDPLLWNFVNVYIPIDTPAGNIIGQPDDTGKLSIKGFPAEKGFSDSGNLEYVNEPLNGAAAVKLTNKQVFRLALVNQISQSYAIRIRYASNATANNWFHLYTPSGSPINGHLIFPATNTDATMSVQGENGRYGLVTATESVTIPAGGAEIIIENLNQTDLFIDRIEFVPV

SEQ ID NO: 113 - protein, 687 aa, Bacillus sp.
LKFQQKVDFTFLKDLNNSSSFIPHPDLFSFKHFNILKKGMYHSPDLNAMQELRPLCEFNDPFGNTLRNYVTAAAGLVAVLAGIANPVLAPLVVAGAVVNLFLPLLWPEDSTAKDQKLMCEVGALIDTKLDDYVYKQATAQLEGLEEVIAEYRDAVKSFQEKRLPREVGAEWVRTQFQIVHSAIIKAIPTFRLKGYEITLLPLYCKLANTHLLLLRDIATFGSIYGFTPQILASYYEDLIRRIAIYTDHCVKTYDEGLELAKQRKAIINKNGNNPLYPWVYYPDPEAYEYDLYEYEYQVVEDWNLFNTYRRTMTLLVLDWVAIWPTFDLKLYPVRQGLKTALTREVYTNIVGYHTLMPTWGTPTLTREKIEKEFVRAPHLFTWVNKIDVRKSNVNDLITGIVLKDSYTLDTNIHVNSIGITENTSSACNISEYPITKVDVKFNGREKINFIEFKSEQNKSISCGFFMDQPSNPSAQCGRSCEPRPPYVFTSVVPNIDLHGIPATYASIMTKIPPHQLSWMYIGKSSIMNDLAIDSVGCAWTHPSVDRQNMLASDAITQIPAVMAQILGNGAQVISGPGHTGGDLVKIGIRAFFAIKITLPTNIEQEYILRIRCANHRTAHLSVINGSESETVLIPENTDYNLKNYKSFRLIDIPPTFRLFTKQRQYTLIFRSDIEEIIIDKIEFIPQR

SEQ ID NO: 114 - protein, 687 aa, Artificial sequence
  Variant of native sequence
MKFQQKVDFTFLKDLNNSSSFIPHPDLFSFKHFNILKKGMYHSPDLNAMQELRPLCEFNDPFGNTLRNYVTAAAGLVAVLAGIANPVLAPLVVAGAVVNLFLPLLWPEDSTAKDQKLMCEVGALIDTKLDDYVYKQATAQLEGLEEVIAEYRDAVKSFQEKRLPREVGAEWVRTQFQIVHSAIIKAIPTFRLKGYEITLLPLYCKLANTHLLLLRDIATFGSIYGFTPQILASYYEDLIRRIAIYTDHCVKTYDEGLELAKQRKAIINKNGNNPLYPWVYYPDPEAYEYDLYEYEYQVVEDWNLFNTYRRTMTLLVLDWVAIWPTFDLKLYPVRQGLKTALTREVYTNIVGYHTLMPTWGTPTLTREKIEKEFVRAPHLFTWVNKIDVRKSNVNDLITGIVLKDSYTLDTNIHVNSIGITENTSSACNISEYPITKVDVKFNGREKINFIEFKSEQNKSISCGFFMDQPSNPSAQCGRSCEPRPPYVFTSVVPNIDLHGIPATYASIMTKIPPHQLSWMYIGKSSIMNDLAIDSVGCAWTHPSVDRQNMLASDAITQIPAVMAQILGNGAQVISGPGHTGGDLVKIGIRAFFAIKITLPTNIEQEYILRIRCANHRTAHLSVINGSESETVLIPENTDYNLKNYKSFRLIDIPPTFRLFTKQRQYTLIFRSDIEEIIIDKIEFIPQR

SEQ ID NO: 115 - protein, 686 aa, Artificial sequence
  Variant of native sequence
LKFQQKVDFTFLKDLNNSSSFIPHPDLFSFKHFNILKKGMYHSPDLNAMQELRPLCEFNDPFGNTLRNYVTAAAGLVAVLAGIANPVLAPLVVAGAVVNLFLPLLWPEDSTAKDQKLMCEVGALIDTKLDDYVYKQATAQLEGLEEVIAEYRDAVKSFQEKRLPREVGAEWVRTQFQIVHSAIIKAIPTFRLKGYEITLLPLYCKLANTHLLLLRDIATFGSIYGFTPQILASYYEDLIRRIAIYTDHCVKTYDEGLELAKQRKAIINKNGNNPLYPWVYYPDPEAYEYDLYEYEYQVVEDWNLFNTYRRTMTLLVLDWVAIWPTFDLKLYPVRQGLKTALTREVYTNIVGYHTLMPTWGTPTLTREKIEKEFVRAPHLFTWVNKIDVRKSNVNDLITGIVLKDSYTLDTNIHVNSIGITENTSSACNISEYPITKVDVKFNGREKINFIEFKSEQNKSISCGFFMDQPSNPSAQCGRSCEPRPPYVFTSVVPNIDLHGIPATYASIMTKIPPHQLSWMYIGKSSIMNDLAIDSVGCAWTHPSVDRQNMLASDAITQIPAVMAQILGNGAQVISGPGHTGGDLVKIGIRAFFAIKITLPTNIEQEYILRIRCANHRTAHLSVINGSESETVLIPENTDYNLKNYKSFRLIDIPPTFRLFTKQRQYTLIFRSDIEEIIIDKIEFIPQ

SEQ ID NO: 116 - protein, 629 aa, Unknown
  unknown organism from environmental sample
MNSNNEINPNVINDCLSVSERNRDSLNHDVFISAPGLVDTTANITSAILSALGVPILGTVVKLYSKLFGFLWGSIPGQDPWKELMDRVEILIDQKLTEYARSKALAELEGLQNVMKSYVDALESWQNNSRNSQTRLLVQQRFVAADSHFKKAMPSFAIKNYEVSLLPVYAQAANLHLLLLRDSQIFGKDWGMPQNEVDLFYKEQLDSIEKYSDHCVEWYHTGLNQLKDKGSTAKNWVDYNRYRREMTLAVLDIVALLPNHDVHMYPITVHAELTREIYTDPAGSYIPFTGNFREVLSWHEMSKAYALPGFNEMESLIPKPSRFTTLNNIKMYTRKREIDKYEYYYYWTGHKLERELIQASDQALRIKTNSGEITSEENVFYFGSSTPIYKVNCNYVGRYENSLAGVNQVEFHYLTSDGYQKKKEYTKKIVVFSPSQRMFDSEKELKNHRLSYVNSFDLIWRINNTKGGTIPILGWTHSSVAPKNTLYPDKITQISAVKSESHLASEVIKGPGYTGGNLLRGSSNMGRIPLFRPNSNNYPDYYRIRIRYAADKDGILSMRLASSSHNIQIPFKATMKKDADFKYNSFQYVETTISFGLWIEFVRFEAHEGLYLDKIEFIPINKMLKGNNL

SEQ ID NO: 117 - protein, 620 aa, Artificial sequence
  Variant of native sequence
MNSNNEINPNVINDCLSVSERNRDSLNHDVFISAPGLVDTTANITSAILSALGVPILGTVVKLYSKLFGFLWGSIPGQDPWKELMDRVEILIDQKLTEYARSKALAELEGLQNVMKSYVDALESWQNNSRNSQTRLLVQQRFVAADSHFKKAMPSFAIKNYEVSLLPVYAQAANLHLLLLRDSQIFGKDWGMPQNEVDLFYKEQLDSIEKYSDHCVEWYHTGLNQLKDKGSTAKNWVDYNRYRREMTLAVLDIVALLPNHDVHMYPITVHAELTREIYTDPAGSYIPFTGNFREVLSWHEMSKAYALPGFNEMESLIPKPSRFTTLNNIKMYTRKREIDKYEYYYYWTGHKLERELIQASDQALRIKTNSGEITSEENVFYFGSSTPIYKVNCNYVGRYENSLAGVNQVEFHYLTSDGYQKKKEYTKKIVVFSPSQRMFDSEKELKNHRLSYVNSFDLIWRINNTKGGTIPILGWTHSSVAPKNTLYPDKITQISAVKSESHLASEVIKGPGYTGGNLLRGSSNMGRIPLFRPNSNNYPDYYRIRIRYAADKDGILSMRLASSSHNIQIPFKATMKKDADFKYNSFQYVETTISFGLWIEFVRFEAHEGLYLDKIEFIPI

SEQ ID NO: 118 - protein, 1163 aa, Bacillus sp.
MAYQNENEFEILDAIPSKAPLSNGTQRYPLTNSSRTGLQNMNYKDFLNQCESPVIGEVEPYIDVRSATLKSIEVISTMISSLPIPGASIIGFAGKFYSAIIGLLWPDGQEDVWRAFMEAVEELIDQKIETYAKAKALAELEGIFAVVELYQDSLARLEKDPNNARLQEETREQFLATNTVIASSMPSFKVQNFEVPLLTVFTEAANLHILILRDAAMFGQQWGMDPSTVKAYRERFNLALGEYTDYCVKWYHVGLDRARKLKANISDRDKYPWIGPGYIGVSPDKWQYTEDWNLFNDYRRNMTLQVLDMVALWSSLDDRYYPLPTNVQLTRDIYTNVWGIGTDLGKGSLDQVEARFTRPPHLVTQQLALGYYTQTDTRGFETIAGSYSTLKGCGRLGIVSETNFNGKKTNTHRYWWQPFSEVSGFHFVETSILSSPGKVPVGNVVVGGGAWSTFNIPGQVVNWFCSTYPDQLLPVRGLRGANFTLNSDTLNYANVFYNDRINQFPAVMSYSILGSASVVRGPGSTGGDLVKLNPGSQLDLMVSPDSYARYKPFKVRIRYASESNGNLNVAKWNQEGTAFWENKDIPVEQSFGESMTYQSFKYVETISVPANEDTFRIVLHSKSGGPMYIDKIELIPLNSSLAEYEAEQDLEKARKAVNALFTDDAKNALKLNITDYAVDQAANLVECVSEEFHAQEKMILLDQVKYGKRLSQARNLLNFGDFESPDWFGENGWKTSPHVHIASDNPVFKGRYLHMPGAMSPQFSNNTYPTYAYQKVDESKLKAYTRYLVRGFVGNSKDLELLVGRYGKDVHVEMDVPNDMQYTLPRNECGGFDGCKNHDVYQYGSDSHKPCGCKASHVFTYHIDTGCLDQEENLGLFFALKIASENGMANIDNLEIIEAQLLTGEALARVKKREQKWKQEMAQKRLQTEKAVQAAQGAMQTLFTNAQYNCLKFETLFPQIAHVEELVQQIPYAYHPFLSEVFPTVPGMNFETIQQLSTVIGNARVLYEQRNLVLNGTFSSGTGNWHVTEGVNVQPLQNTSVLILSEWSHEASQQLHIDPDRGYVLRVTARKEGRGKGTVTMSDCAAYTETLTFTSCDYNTSGFQTMTSDTLFGFVTKTLEIFPDTDRIRIDIGETEGTFQVESVELICMDQMEDVSNFENEIQ

SEQ ID NO: 119 - protein, 637 aa, Artificial sequence
  Variant of native sequence
MAYQNENEFEILDAIPSKAPLSNGTQRYPLTNSSRTGLQNMNYKDFLNQCESPVIGEVEPYIDVRSATLKSIEVISTMISSLPIPGASIIGFAGKFYSAIIGLLWPDGQEDVWRAFMEAVEELIDQKIETYAKAKALAELEGIFAVVELYQDSLARLEKDPNNARLQEETREQFLATNTVIASSMPSFKVQNFEVPLLTVFTEAANLHILILRDAAMFGQQWGMDPSTVKAYRERFNLALGEYTDYCVKWYHVGLDRARKLKANISDRDKYPWIGPGYIGVSPDKWQYTEDWNLFNDYRRNMTLQVLDMVALWSSLDDRYYPLPTNVQLTRDIYTNVWGIGTDLGKGSLDQVEARFTRPPHLVTQQLALGYYTQTDTRGFETIAGSYSTLKGCGRLGIVSETNFNGKKTNTHRYWWQPFSEVSGFHFVETSILSSPGKVPVGNVVVGGGAWSTFNIPGQVVNWFCSTYPDQLLPVRGLRGANFTLNSDTLNYANVFYNDRINQFPAVMSYSILGSASVVRGPGSTGGDLVKLNPGSQLDLMVSPDSYARYKPFKVRIRYASESNGNLNVAKWNQEGTAFWENKDIPVEQSFGESMTYQSFKYVETISVPANEDTFRIVLHSKSGGPMYIDKIELIPL

SEQ ID NO: 120 - protein, 280 aa, Bacillus sp.
VEVINMAILDIWTEVDKFATNYCKVRGLTYSGKRGSVPQYPLILTKFQSSLPDDRVLTPPEHVFTFPKTYDNITSQTQTTTLEFSEEITESTSTTTTAGVTIGTELSSTQTFNIKFVEVGLTQTVSSEYTTTSSKTLMTEHKRIVTSAEQITVKPYTRIKAVLVIENGIYDLITNITCDLNGMIYFDATNGTSFLTTIYEVLKGNNTPDFTFSFEDPEDPTCHFNGSGKIKGNSGLNSYVRVEELPLEGHSGQYRQYILPGQDLTTDIITSENFGIPIFN

SEQ ID NO: 121 - protein, 275 aa, Artificial sequence
  Variant of native sequence
MAILDIWTEVDKFATNYCKVRGLTYSGKRGSVPQYPLILTKFQSSLPDDRVLTPPEHVFTFPKTYDNITSQTQTTTLEFSEEITESTSTTTTAGVTIGTELSSTQTFNIKFVEVGLTQTVSSEYTTTSSKTLMTEHKRIVTSAEQITVKPYTRIKAVLVIENGIYDLITNITCDLNGMIYFDATNGTSFLTTIYEVLKGNNTPDFTFSFEDPEDPTCHFNGSGKIKGNSGLNSYVRVEELPLEGHSGQYRQYILPGQDLTTDIITSENFGIPIFN

SEQ ID NO: 122 - protein, 334 aa, Bacillus sp.
MKSIKSKILVAAAIASVGTSFAIASPGLTKADSINPNSFEKQQLSVTPNYVSPEREDVQGFEDYLTANDTLLTTLQDFTNWNVKKFMAAQFNYSKLPSYSVEVVPNTKKDEELSSPEFVGTSELSHTGGTSEQTLYSSGFSKAIAASVTSTTTHGAKVGGKAGGKLKLPLVAEGSVELSAEYNFAHAETKTDSDLVTYTVPSQPVKLKPNERAVVTATLKMMESTGDVKLRTAYSGEITAYYKDLSDINKDHSELMGNWVKTLLNQKENQALNGILDYSRTDPNVAYLDGKGTYKAKYGSKMIIKVEIFQKNTRTADSTPIRSYSYETTPEIKQ

SEQ ID NO: 123 - protein, 304 aa, Artificial sequence
  Variant of native sequence
MDSINPNSFEKQQLSVTPNYVSPEREDVQGFEDYLTANDTLLTTLQDFTNWNVKKFMAAQFNYSKLPSYSVEVVPNTKKDEELSSPEFVGTSELSHTGGTSEQTLYSSGFSKAIAASVTSTTTHGAKVGGKAGGKLKLPLVAEGSVELSAEYNFAHAETKTDSDLVTYTVPSQPVKLKPNERAVVTATLKMMESTGDVKLRTAYSGEITAYYKDLSDINKDHSELMGNWVKTLLNQKENQALNGILDYSRTDPNVAYLDGKGTYKAKYGSKMIIKVEIFQKNTRTADSTPIRSYSYETTPEIKQ

SEQ ID NO: 124 - protein, 591 aa, Bacillus sp.
MSQNSNNNAAGAQMGLSINDQARDGVIISTGIGWAILGFVPGIGFGLSAAAGLLNVISPFLWPESGNSQITWEKLMNTVEERIDQRVDTLIKSRAIENTRVLQSRMRDYLQAISNLKTDPNNETYKADVRREFDRAEDDAKAAIIQLNPHTTNGTEDTRHNILLLANYAQVANVHLLLLRDVVQYGEQWGFSPLEVQQYYSNTSSVGNPGMLQLLAKYTDHCVSWYNTGLQQQYNFWDWDKFNNFRRDMTIMVLDIVSFWPTYDPNLYAVPTKSQLTRTVYTQRVGKEKRHIFMEPTLAAPRLFSWLHQVKFHVQSRGYADTIAGLQQTFQNTLSDTLWQESLNGERLGAEQNLNFSSPTTGDEVWRIINHLRLNPYSTLVNEMNGFQFEFTQSPVTDIAYLSDNPDYQKISGLPCTGGNITCTDKNLYSHRFSYLGARAIDYPTGGPRLTTFTHGWTHVSADHNNLIDAQKITQIPAVKASSISGGATVVKGPGSTGGDLIELPFSTAGRITLNVTLADITKSYKVRVRYAYGSNSKIADTLTYADFSYSDSDIITPSSSDYTYIYDLNPSDFGGLEGKFFIDKIEFIPM

SEQ ID NO: 125 - protein, 965 aa, Bacillus sp.
VMNMSNTLVPYNVLRSMDMPNISGTKWDKGMFINALDNTSFLLELIEKGINDGDDVLGLLSFIGLTALEAIPVVGGVMSKLVSMIFFPTKSNINSQKIWEQLEKAIEQIVDKKITEAMMSQLMHEITGLANVLEEYRNASDLYNGKKSFNIPDKMTPGEYLIDVFTDANLLFIQRIPIFQNFKYDVVFLPFFVHAAEMHILLVRDAAIHGLEWGFEETVHQKFKKDLKGLINKYSGHLLKTYKKGLKEASERKLDSNDFPTSNNQHHYINTVRWNVINQYKRGMALTVFDFAYKWKYYQEVYQNNITLNPVRTIYSDIAGSVYPYEKTTNEIDNIIKEQNLKYRGLLKELLINHGDRIDSIQSKYIRNNEIIDSNRTGGAGGRATFIDLKSPINNPFIQVNMWSELVPFSLGFKFYNGEEPKPIWGGWNPGKHKFGSYHYVGNKVSSIIGFGKNGTVGFNSLDAMVVGFKQDDYIPENRFVGINKNGEPVTKVIDAENFYQEKFQSNIKMIDEPMFGDGVLQFENYSNNLNKDSYVTYQIDAKIEGTYELHAIIGAKKAKDKVALKIALNEKQPEILITESFDNSDIWDGMSLNEGLVYKRILLGNFQLKKGMNRITIHNGVLQASANIQTWNLATLELTITSNSLKDPDITTLYDKDNYSGTKKFIFENTSRLKDFNDKTSSIKVESHLAGIRIYQDYNYKGKFMDLVGGEKISLKNHSFNNKTSSIKFANIVLYNQDNYKGSRKLVFEDIPDLGKQDFNDKTSSIVVSSNVSGARLYEHAYYKGKYVDVVGGQKLNLKNHVLDKNISSIKFFKEGEVLNGVYQIITALNNTSVIDKHLQKPDVHLWENVENKNQKWRIEYDVAKKAYQIKNMLNENLVLTFYLSSQGYVIRCLPNMGDNYSQYWLFEHVGNGYYIIKNKNVNWVLDVDGANSDNGTKIKIQSQHDLNDPLINAQKFKLKDINN

SEQ ID NO: 126 - protein, 962 aa, Artificial sequence
  Variant of native sequence
MSNTLVPYNVLRSMDMPNISGTKWDKGMFINALDNTSFLLELIEKGINDGDDVLGLLSFIGLTALEAIPVVGGVMSKLVSMIFFPTKSNINSQKIWEQLEKAIEQIVDKKITEAMMSQLMHEITGLANVLEEYRNASDLYNGKKSFNIPDKMTPGEYLIDVFTDANLLFIQRIPIFQNFKYDVVFLPFFVHAAEMHILLVRDAAIHGLEWGFEETVHQKFKKDLKGLINKYSGHLLKTYKKGLKEASERKLDSNDFPTSNNQHHYINTVRWNVINQYKRGMALTVFDFAYKWKYYQEVYQNNITLNPVRTIYSDIAGSVYPYEKTTNEIDNIIKEQNLKYRGLLKELLINHGDRIDSIQSKYIRNNEIIDSNRTGGAGGRATFIDLKSPINNPFIQVNMWSELVPFSLGFKFYNGEEPKPIWGGWNPGKHKFGSYHYVGNKVSSIIGFGKNGTVGFNSLDAMVVGFKQDDYIPENRFVGINKNGEPVTKVIDAENFYQEKFQSNIKMIDEPMFGDGVLQFENYSNNLNKDSYVTYQIDAKIEGTYELHAIIGAKKAKDKVALKIALNEKQPEILITESFDNSDIWDGMSLNEGLVYKRILLGNFQLKKGMNRITIHNGVLQASANIQTWNLATLELTITSNSLKDPDITTLYDKDNYSGTKKFIFENTSRLKDFNDKTSSIKVESHLAGIRIYQDYNYKGKFMDLVGGEKISLKNHSFNNKTSSIKFANIVLYNQDNYKGSRKLVFEDIPDLGKQDFNDKTSSIVVSSNVSGARLYEHAYYKGKYVDVVGGQKLNLKNHVLDKNISSIKFFKEGEVLNGVYQIITALNNTSVIDKHLQKPDVHLWENVENKNQKWRIEYDVAKKAYQIKNMLNENLVLTFYLSSQGYVIRCLPNMGDNYSQYWLFEHVGNGYYIIKNKNVNWVLDVDGANSDNGTKIKIQSQHDLNDPLINAQKFKLKDINN

SEQ ID NO: 127 - protein, 811 aa, Artificial sequence
  Variant of native sequence
MSNTLVPYNVLRSMDMPNISGTKWDKGMFINALDNTSFLLELIEKGINDGDDVLGLLSFIGLTALEAIPVVGGVMSKLVSMIFFPTKSNINSQKIWEQLEKAIEQIVDKKITEAMMSQLMHEITGLANVLEEYRNASDLYNGKKSFNIPDKMTPGEYLIDVFTDANLLFIQRIPIFQNFKYDVVFLPFFVHAAEMHILLVRDAAIHGLEWGFEETVHQKFKKDLKGLINKYSGHLLKTYKKGLKEASERKLDSNDFPTSNNQHHYINTVRWNVINQYKRGMALTVFDFAYKWKYYQEVYQNNITLNPVRTIYSDIAGSVYPYEKTTNEIDNIIKEQNLKYRGLLKELLINHGDRIDSIQSKYIRNNEIIDSNRTGGAGGRATFIDLKSPINNPFIQVNMWSELVPFSLGFKFYNGEEPKPIWGGWNPGKHKFGSYHYVGNKVSSIIGFGKNGTVGFNSLDAMVVGFKQDDYIPENRFVGINKNGEPVTKVIDAENFYQEKFQSNIKMIDEPMFGDGVLQFENYSNNLNKDSYVTYQIDAKIEGTYELHAIIGAKKAKDKVALKIALNEKQPEILITESFDNSDIWDGMSLNEGLVYKRILLGNFQLKKGMNRITIHNGVLQASANIQTWNLATLELTITSNSLKDPDITTLYDKDNYSGTKKFIFENTSRLKDFNDKTSSIKVESHLAGIRIYQDYNYKGKFMDLVGGEKISLKNHSFNNKTSSIKFANIVLYNQDNYKGSRKLVFEDIPDLGKQDFNDKTSSIVVSSNVSGARLYEHAYYKGKYVDVVGGQKLNLKNHVLDKNISSIKFF

SEQ ID NO: 128 - protein, 347 aa, Bacillus sp.
MGVYTATSYLTFSVSSNFYIINLNGYFQRILFEGGIMIMITNIEQSTINYMIWYATHYLHANPNTFYNVGLYPYEIHNLSIVPKFNRITVNPSQKDTVIQTIENNTDVEQHRIIEFYEKTTENITNCTTAGYSIYEGIKSTFTCNIQINFLISGGLEESLEVPVHSEYKCHDTETTNTTYSKLWQVKQTVIIPPHSRINANLIIMGTNIKIPMQLSANIKGTHVHNNKSNYFSSLSFQQHDGSKVRAKFCASNLSQDAWPDKPVSFRSPGPYSSLNLKGDATTTIEPGLYAMVRFEKIPLNGNYQESKIWYSDQVLLRDGREIRLPNFDPLTGKASCIDVDMMMIGN

SEQ ID NO: 129 - protein, 311 aa, Artificial sequence
  Variant of native sequence
MIMITNIEQSTINYMIWYATHYLHANPNTFYNVGLYPYEIHNLSIVPKFNRITVNPSQKDTVIQTIENNTDVEQHRIIEFYEKTTENITNCTTAGYSIYEGIKSTFTCNIQINFLISGGLEESLEVPVHSEYKCHDTETTNTTYSKLWQVKQTVIIPPHSRINANLIIMGTNIKIPMQLSANIKGTHVHNNKSNYFSSLSFQQHDGSKVRAKFCASNLSQDAWPDKPVSFRSPGPYSSLNLKGDATTTIEPGLYAMVRFEKIPLNGNYQESKIWYSDQVLLRDGREIRLPNFDPLTGKASCIDVDMMMIGN

SEQ ID NO: 130 - protein, 596 aa, Bacillus sp.
MKIENDKIDQITMNEVVDNYNLEELYKLNRGVTSIISWIAKSIGKWILKEGLGALTDIVLGKNGDPMKKIMQSVENIINQRLTEVKKAELEAEYIGFINSIDRLQDAINLVKKYENDKSSIGIEELIKAKDVIKHQIYALDILFTQRLPQFEISGYEGISLPLFAPIVTLHLTLLKDAILNGKKWDLDADSIKYYQNSFNKLVPEYTKRAINLYDIERKRRNPNEIFILKNAMKETLNLIYLWSLYKYEGINPTFSQSNWLTEGALPFNDHKHWEKIYTIANGPTNGFIRGMYYFLTNKAILGIGNDDYLHGIHPFYSNHNKYNQPIDLLGSPGDRRYTSDIPSWKTDVHISDVNKTKKWLVTIDGKIVLSNERGPFLEPSTQSYYEDHFVRTFSYIPYNINQISQFSMGDTLSLHDTPNKMVRGNVVLGFAPNNTKTFFENGKHHIPKESSYTIPALQFYDIQPANNVYLKEYLEQGTDGGLGIMGKNKTDETCIHYRINLENISENLGYKTLLRLGGIGTVRMFIELDENNRIQVGEVKTTNLYGWKDYFIEGPLPKHLKNKQEVSLVINVGKSDIKFSHLILIPKNQFKTLIP

SEQ ID NO: 131 - protein, 715 aa, Bacillus sp.
MHMENENYNNENMVIDVQGGPYNVLAKPFYLKTDEEFDRDIQQWAWDYENSEYQMPFIATAIGGFLLKQLASFAAKKILGGLYNKIFPGNNTLTMEQILAETEKLVKREVTAAVRDRVKQELVGLQRTVYAFNQEIETFEGFNNLSPELQQNEIKKKELYGPLYEMYRESSGLPEDEIVDEPRGIIESANALNLYFEGRLPQFSSENPEWKIELLPLFAQAANLHILFLRDVVINATEWGLTPSELTLYKTRLKDAIKNHSNHCIATYKNAFESSFPNTTFDYMLDFRNFMVFNVLDYVGIWSNIKYQGLVINSSKNIYYYGTNKNTKSRFPLSYWPILNRLFHGKANKILSGTVALNTTTRTKNIVIPGLPPIPATNWAHTYNFKTNYYGGIATGIIGAKSAPSSSPITPPSLISSYSIENRTMSIPSPVTTPLVTAAHLNGYESSSASTVSNNMFAYVARDNKKYSIQIPINYSSGYNYNIPDYTIKNIAPLPRGVNFANQAFIDINGPTQNIYGTDRTYLETAIATFNRTIIQDYTSNYSIKHRIPVDTASGKALGFTIAPFHCDWAYTYGTSNGRNPYINEQFGNNGDSLAVETTIGTNGHSKINYKIRNNSSINARYNVYLRTYVSTYAPSNGTARISLNVNGSTIRSLDIIQSGHEGINDNSKYFKMTQLYSGLTMNGNSDYTFELTHTGSAIYIGSIIFVPSDIVPLY

SEQ ID NO: 132 - protein, 729 aa, Bacillus sp.
MNRNYPNNEYEIMNNNEIHQPRYPLAEAPGSELQRMNYTDWMKRCAGGEPEDLFSNSNAIRNGIIIGTSIVTAILSVSSPLAAATTGIIAVLLPYLWPETPATIQAQFTWDQLMSAAGELIDNRISDLVRTNAINTLRILQSRIRDYQQAICNLKADPNNEAYKADVRREFNDAEDQAKSVIIELQSNGYEISLLASYAQAANLHLLLLRDVVKYGESWGFSFTEVQQYYSNTSAVGNPGMLQLLATYTDYCVNWYNTGVNNLKQQAGLTIADWNKVNDFRRDMTIMVLDIVSLWPTYNPRIYAQPTKSQLTRSVYTPMSGQVFRSIEAIDNEIMPPPSLFSWLREVTLFRRAFPVSTNEYALFTQYAGYKMSFQNTLNPTLQETPISGERGDEVNSVRIGEEPNLEVYKMQNILLGSGASRDFESPQTFDFHFTPSGTVERVGINYANIQGEPTSATNQGLACNNNSSEPCDPCTSVTPCSVGPINTTIPCDSLTYYSHRLSRIGGVMGANPQSIIGLTYGWTHVSADRTNTIETEKITQIPAVKGRKLEGDVIKGPGSTGGDLVKLYPVYGRNQLQIYLNIPARTNNISGYKIRIRYASKQSTDIGVELERTINPQWRRSTILATYSGDNLTYNSFSYHDVLEIDSQESAHLANLRIRKVTDYSAGTEITLDKIEFIPIEGSVEEYKADQDLEKARNAVNALFTGAAKNALKLNVTDYAVDQAANLV

SEQ ID NO: 133 - protein, 681 aa, Artificial sequence
  Variant of native sequence
MNRNYPNNEYEIMNNNEIHQPRYPLAEAPGSELQRMNYTDWMKRCAGGEPEDLFSNSNAIRNGIIIGTSIVTAILSVSSPLAAATTGIIAVLLPYLWPETPATIQAQFTWDQLMSAAGELIDNRISDLVRTNAINTLRILQSRIRDYQQAICNLKADPNNEAYKADVRREFNDAEDQAKSVIIELQSNGYEISLLASYAQAANLHLLLLRDVVKYGESWGFSFTEVQQYYSNTSAVGNPGMLQLLATYTDYCVNWYNTGVNNLKQQAGLTIADWNKVNDFRRDMTIMVLDIVSLWPTYNPRIYAQPTKSQLTRSVYTPMSGQVFRSIEAIDNEIMPPPSLFSWLREVTLFRRAFPVSTNEYALFTQYAGYKMSFQNTLNPTLQETPISGERGDEVNSVRIGEEPNLEVYKMQNILLGSGASRDFESPQTFDFHFTPSGTVERVGINYANIQGEPTSATNQGLACNNNSSEPCDPCTSVTPCSVGPINTTIPCDSLTYYSHRLSRIGGVMGANPQSIIGLTYGWTHVSADRTNTIETEKITQIPAVKGRKLEGDVIKGPGSTGGDLVKLYPVYGRNQLQIYLNIPARTNNISGYKIRIRYASKQSTDIGVELERTINPQWRRSTILATYSGDNLTYNSFSYHDVLEIDSQESAHLANLRIRKVTDYSAGTEITLDKIEFIPI

SEQ ID NO: 134 - protein, 921 aa, Bacillus sp.
MQNTVSLKVDQMTVIGLVGFYFKDTAFKDLMFIQVGEKSNLMDKSRINTVSQQTHSVRWMGNLIPPETGKYKLSTSLNNNVIMQINGETVINQSSIEKSLHLEKDNVYEIKIEYRDTSDTLPDLQLFWSVGDAKQEQIPEQYILSPNFSEKENSRVEKEIQPFFPDYNLFDRQQENGKKQSISAPVDSDNDGIPDEWEEKGYTFKDNQIVAWNDSFSALGYRKYVSNPRKAKTAADPYTDFEKVTGHMPAATKDEARDPLVAAYPAVGVGMEKLHFSKNDNVSEGEGGTVSKTVTKTDTTTNTVEGGGTIGWGDKGFSLSLSAKYAHSWSNSTSTADTDSTSWSSQIGINTAERAYLNANVRYYNAGSAPIYELRPTSNFVFQNSGDSITTITAGPNQIGNSLGPGATYPQKGLAPISLDKANETGIVKISINAEQLDKLQEGTETLNLETTQNRGQYATLDATGTPVTDPSKQWDPIRTNIDAVSGSLTLNLGTGKENLERRVTAKNMNDPEDKTPEITIKEAIKKAFNAKEKDGRLYYTDQNNNNIFIDEPAINLIADQNTKKEIESQLSQMPGKKIYDAKWKRGMKITLHVPIAYYDFEENSLSWPYTYRENGGHTGKIHAMINTSGHGVSPHFRFKPYTSYTARAYVRTSSATGNNNVTFYIDNNNGIGQGVKTSGKVQGNQWVLLEFSFNTGNNPEYFLYLGFTNNGNANLHFDDVSVTEWKPTENIQKNHVFSKWDARIDAPFGSKIHGVTFSKLPKAKLRYQLDIQGVLKPIQSNMVDSNGYIDLTKLNNGEPISAQHHYFTLYAVDEKNDNLKVNVAQRSPLTHGKETWNQVGNYMNGITFNSVPNQKVRYQLAINNVPTSIRFGNPVDPQGRRYVNFLEFNAGYGIPLNKQIRVFVVDEKDNNLREQIAFRS

SEQ ID NO: 135 - protein, 857 aa, Bacillus sp.
MRRIVIYNSVKKKNKFAHFTWHLDETYIKVKGEWCLQGDINKKNVGNIGGITMGTDQNKNEYEILDSSSFHEYTSNRYPFAKNPNVMENTNYKDINPSFIGSALGSIFNIFQLYASFFQTPSVFNGIELIQGIISRILNFQVINLTINDVQQLIDQTLENHIRNEANQRFNSIQANFNQYLSNKSLYINNPSDSTRRLFVNSLSANERDLRIALDVTFSLANREVLLLPNFTQIAMLHLTILKDAVMFSGPDLIAPTVSEASENSILNRPPSDSYESALLTSISMYTNYCVRHYNEGLNRIRNRGTSSNIWLNFHSFRREMTLTVLDFVALFSFFDTTKYPASRNFTPPVVSQLSRVIYTDPVGAIRTDGRGWFDPPVGTDRIRVNFASIENEIPAPTTSRHLSELTISSGPLGFGINPSRTHSWQGNRNVNISAPTDVSGVISNRTQTIPARNIFRVDSRVYTLDWRLYGVYRAEFFQDASQNSQRRVFAENPPTGAGAQSANNFRFLPGENSDTPTPQDYTHLLSRVVNATVGLTPATGNQRNSVLIFGWTHKSLTSENIYRINEITQVAAVNTRSNSGIQVISGPGFTGGDLVRMDPNGSVSYNFTPANQQAGQSNLAIRLRYASQGTASLRITFGNGSSQVIPLDATTSSIKNLQYEGLRFVDVPNNVSSLPTGTSMTIQNISTNSNVVLDRVELFSDIPIPISEEPIIIPGNYQIVTSLNNSSVVDLHVDTNNVTLWSDNGRTSQFWGFTYDQSRNAYVIRSVRNTDLVLAWNVPSIDRNVFATPFVPGQDEYYWMIERFEGGYILKNMGNPNFLLTAYREGTTNGTNITVNQRHNVNNSYKFGQIFFLRRT

SEQ ID NO: 136 - protein, 650 aa, Artificial sequence
  Variant of native sequence
MGTDQNKNEYEILDSSSFHEYTSNRYPFAKNPNVMENTNYKDINPSFIGSALGSIFNIFQLYASFFQTPSVFNGIELIQGIISRILNFQVINLTINDVQQLIDQTLENHIRNEANQRFNSIQANFNQYLSNKSLYINNPSDSTRRLFVNSLSANERDLRIALDVTFSLANREVLLLPNFTQIAMLHLTILKDAVMFSGPDLIAPTVSEASENSILNRPPSDSYESALLTSISMYTNYCVRHYNEGLNRIRNRGTSSNIWLNFHSFRREMTLTVLDFVALFSFFDTTKYPASRNFTPPVVSQLSRVIYTDPVGAIRTDGRGWFDPPVGTDRIRVNFASIENEIPAPTTSRHLSELTISSGPLGFGINPSRTHSWQGNRNVNISAPTDVSGVISNRTQTIPARNIFRVDSRVYTLDWRLYGVYRAEFFQDASQNSQRRVFAENPPTGAGAQSANNFRFLPGENSDTPTPQDYTHLLSRVVNATVGLTPATGNQRNSVLIFGWTHKSLTSENIYRINEITQVAAVNTRSNSGIQVISGPGFTGGDLVRMDPNGSVSYNFTPANQQAGQSNLAIRLRYASQGTASLRITFGNGSSQVIPLDATTSSIKNLQYEGLRFVDVPNNVSSLPTGTSMTIQNISTNSNVVLDRVELFSD

SEQ ID NO: 137 - protein, 805 aa, Artificial sequence
  Variant of native sequence
MGTDQNKNEYEILDSSSFHEYTSNRYPFAKNPNVMENTNYKDINPSFIGSALGSIFNIFQLYASFFQTPSVFNGIELIQGIISRILNFQVINLTINDVQQLIDQTLENHIRNEANQRFNSIQANFNQYLSNKSLYINNPSDSTRRLFVNSLSANERDLRIALDVTFSLANREVLLLPNFTQIAMLHLTILKDAVMFSGPDLIAPTVSEASENSILNRPPSDSYESALLTSISMYTNYCVRHYNEGLNRIRNRGTSSNIWLNFHSFRREMTLTVLDFVALFSFFDTTKYPASRNFTPPVVSQLSRVIYTDPVGAIRTDGRGWFDPPVGTDRIRVNFASIENEIPAPTTSRHLSELTISSGPLGFGINPSRTHSWQGNRNVNISAPTDVSGVISNRTQTIPARNIFRVDSRVYTLDWRLYGVYRAEFFQDASQNSQRRVFAENPPTGAGAQSANNFRFLPGENSDTPTPQDYTHLLSRVVNATVGLTPATGNQRNSVLIFGWTHKSLTSENIYRINEITQVAAVNTRSNSGIQVISGPGFTGGDLVRMDPNGSVSYNFTPANQQAGQSNLAIRLRYASQGTASLRITFGNGSSQVIPLDATTSSIKNLQYEGLRFVDVPNNVSSLPTGTSMTIQNISTNSNVVLDRVELFSDIPIPISEEPIIIPGNYQIVTSLNNSSVVDLHVDTNNVTLWSDNGRTSQFWGFTYDQSRNAYVIRSVRNTDLVLAWNVPSIDRNVFATPFVPGQDEYYWMIERFEGGYILKNMGNPNFLLTAYREGTTNGTNITVNQRHNVNNSYKFGQIFFLRRT

SEQ ID NO: 138 - protein, 702 aa, Artificial sequence
  Variant of native sequence
MRRIVIYNSVKKKNKFAHFTWHLDETYIKVKGEWCLQGDINKKNVGNIGGITMGTDQNKNEYEILDSSSFHEYTSNRYPFAKNPNVMENTNYKDINPSFIGSALGSIFNIFQLYASFFQTPSVFNGIELIQGIISRILNFQVINLTINDVQQLIDQTLENHIRNEANQRFNSIQANFNQYLSNKSLYINNPSDSTRRLFVNSLSANERDLRIALDVTFSLANREVLLLPNFTQIAMLHLTILKDAVMFSGPDLIAPTVSEASENSILNRPPSDSYESALLTSISMYTNYCVRHYNEGLNRIRNRGTSSNIWLNFHSFRREMTLTVLDFVALFSFFDTTKYPASRNFTPPVVSQLSRVIYTDPVGAIRTDGRGWFDPPVGTDRIRVNFASIENEIPAPTTSRHLSELTISSGPLGFGINPSRTHSWQGNRNVNISAPTDVSGVISNRTQTIPARNIFRVDSRVYTLDWRLYGVYRAEFFQDASQNSQRRVFAENPPTGAGAQSANNFRFLPGENSDTPTPQDYTHLLSRVVNATVGLTPATGNQRNSVLIFGWTHKSLTSENIYRINEITQVAAVNTRSNSGIQVISGPGFTGGDLVRMDPNGSVSYNFTPANQQAGQSNLAIRLRYASQGTASLRITFGNGSSQVIPLDATTSSIKNLQYEGLRFVDVPNNVSSLPTGTSMTIQNISTNSNVVLDRVELFSD

SEQ ID NO: 139 - protein, 760 aa, Bacillus sp.
VNFFHIKGNDFFITLKNNKEKIVLHKSEAFKKIHAIQKRRSKRSILSPRILGLFVETLLQVYIGVPRIYNKTPSICLLGVLKIRTIQGVKKMNSYQNKNENEHEILDASQNNTNMPNRYPFANDRNMFTMSWNNCQGSTWQQTWESVQSIITIGVYLIQFAAAPSIGGIPILLSIINKLIPSSGQSVAALSICDLLSIIRKEVDDSVLNDGVADFNGKLTNYKEYYLASLNEWLKAGKPNDNRLRNVVDYFKKSEEGFNEILAGSLSRQNAQILLLPTFVQAANVQLLLLRDAVQYKKEWGALLSAEKVGLELISPTIDYGQRLKEKIAQYTNHCVYWYQTGLNQIKQAGTSAEIWSKFNKFRREMTLAVLDVISIFSTYDFDKYPFETNIELTREIYTDPVGYSLGTYSWLNNWPGAFNGLEANGTRADGLVTWLLGIGIYSESVSQYFGGWVGTLHSEYYTGSNTTLNRMSGTISNNYLYFNFYYTDVFKIASLGIMNLAGETSPRPEYRVSRAEFHNSRPYTEVYNANNNGLSRMTIESMLPGVKNPGPSYTDYAHRLSNAACVQYGTSRINVYGWTHTSMKRENQIYPNKITQIPAVKGNSLQAGKATSGPGHTGGNLVNMFYASTLSMNCYFSQPLIYRMRIRYSTSFFTPFYISSPHHSGVVSMALPQTNYVKVDGQTIYVDLMDARAFQIIEVPVEFRATSSGYVNLSFSANASYGVFIDKIEFIPINIKTLEYEGSRNLEKTKKAVNDLFIN

SEQ ID NO: 140 - protein, 669 aa, Artificial sequence
  Variant of native sequence
MNSYQNKNENEHEILDASQNNTNMPNRYPFANDRNMFTMSWNNCQGSTWQQTWESVQSIITIGVYLIQFAAAPSIGGIPILLSIINKLIPSSGQSVAALSICDLLSIIRKEVDDSVLNDGVADFNGKLTNYKEYYLASLNEWLKAGKPNDNRLRNVVDYFKKSEEGFNEILAGSLSRQNAQILLLPTFVQAANVQLLLLRDAVQYKKEWGALLSAEKVGLELISPTIDYGQRLKEKIAQYTNHCVYWYQTGLNQIKQAGTSAEIWSKFNKFRREMTLAVLDVISIFSTYDFDKYPFETNIELTREIYTDPVGYSLGTYSWLNNWPGAFNGLEANGTRADGLVTWLLGIGIYSESVSQYFGGWVGTLHSEYYTGSNTTLNRMSGTISNNYLYFNFYYTDVFKIASLGIMNLAGETSPRPEYRVSRAEFHNSRPYTEVYNANNNGLSRMTIESMLPGVKNPGPSYTDYAHRLSNAACVQYGTSRINVYGWTHTSMKRENQIYPNKITQIPAVKGNSLQAGKATSGPGHTGGNLVNMFYASTLSMNCYFSQPLIYRMRIRYSTSFFTPFYISSPHHSGVVSMALPQTNYVKVDGQTIYVDLMDARAFQIIEVPVEFRATSSGYVNLSFSANASYGVFIDKIEFIPINIKTLEYEGSRNLEKTKKAVNDLFIN

SEQ ID NO: 141 - protein, 734 aa, Artificial sequence
  Variant of native sequence
VNFFHIKGNDFFITLKNNKEKIVLHKSEAFKKIHAIQKRRSKRSILSPRILGLFVETLLQVYIGVPRIYNKTPSICLLGVLKIRTIQGVKKMNSYQNKNENEHEILDASQNNTNMPNRYPFANDRNMFTMSWNNCQGSTWQQTWESVQSIITIGVYLIQFAAAPSIGGIPILLSIINKLIPSSGQSVAALSICDLLSIIRKEVDDSVLNDGVADFNGKLTNYKEYYLASLNEWLKAGKPNDNRLRNVVDYFKKSEEGFNEILAGSLSRQNAQILLLPTFVQAANVQLLLLRDAVQYKKEWGALLSAEKVGLELISPTIDYGQRLKEKIAQYTNHCVYWYQTGLNQIKQAGTSAEIWSKFNKFRREMTLAVLDVISIFSTYDFDKYPFETNIELTREIYTDPVGYSLGTYSWLNNWPGAFNGLEANGTRADGLVTWLLGIGIYSESVSQYFGGWVGTLHSEYYTGSNTTLNRMSGTISNNYLYFNFYYTDVFKIASLGIMNLAGETSPRPEYRVSRAEFHNSRPYTEVYNANNNGLSRMTIESMLPGVKNPGPSYTDYAHRLSNAACVQYGTSRINVYGWTHTSMKRENQIYPNKITQIPAVKGNSLQAGKATSGPGHTGGNLVNMFYASTLSMNCYFSQPLIYRMRIRYSTSFFTPFYISSPHHSGVVSMALPQTNYVKVDGQTIYVDLMDARAFQIIEVPVEFRATSSGYVNLSFSANASYGVFIDKIEFIPI

SEQ ID NO: 142 - protein, 567 aa, Bacillus sp.
VNLMFTSGTKNTLKIETTDYEIDQAAISIECMSDEQNLQEKMMLWDEVKQAKQLSQSRNLLQNGDFGDFSGNDWTLSNDILIQSSSPIFKGSSLEMLGARNIYGSLFSTYMFQKIDESKLKPYTRYRVRGFVGSSKDLKLVVTRYRKEIDVIMNVPNDLVYRNPSPSCGDDHLCESSSQSVMSQGYNIPVTNGYVSDMSSFQSNPGKKHVKCHDRHPFDFHIDTGELDTNTNLGICILFKISNPDGYATLGNLEVIEEGPLTGETLTHAKQKEKKWKQQMEQKRLETQQAYDPAKKAIDALFTSTQELHYHITLDHIQNADQLVQAIPYVYHDWLPNTPGMNYNLYNNLKVRIEQARYLYDARNVITNGDFTQGLTGWHATGKATVQQMDGSSVLVLSNWSAGVSQNLHAQDHHGYMLRVIAKKEGPGKGYVTMIDCNGNQETMKFTSCEEGYMTKTVEVFPGNDRVRIEIGETEGTFYIDSIELLCMKGYTSNNNPHTGNMYEQSYNGNYNQNTRDVYHQGYTNNYKQDSSSMYNQNYTNNDDLHSSCTCNQGHNSGCTCNQGYNR

SEQ ID NO: 143 - protein, 680 aa, Bacillus sp.
LNFKQNFNTIPPAANSFRFTSHPNLFTYEHAHMFKNNRYYLSQNQMNQLRTICEFNDPFGNTLRNYVTASAGLVAVLAGVATPVVAPLVVAGGVVNLFLPLLWPEDSTAKDQKLMCEVGALIDKKLNNFVYEQATKQLEGLEAVIGEYRKAVKSFHEKRLPRDVGAEWVRTQFQIVHSAIKNAIPLFRLKEYEVTLLPLYCKLANTHLLLLRDIAAFGGEYGFTPKILDSYYIDLKEGTGIYTEHCVNTYDVGLELAKKRKATINTNGNNPQYPWMFFRTIETYDYQGVEDWNLFNAYRRIMTLLVLDWIAMWPTFDFKLYPTHMGLKTALTREIYTNIVGYHTLKKEFYWPWDDKPTLKREQIEKEFVRPPHLFTWINQIDVRKSNVNDYITGMVLKDSHTLNPNIHTTYMGTLENTSSSCNILNFPITKVSVKFNGREKINFIEFTSNNNILSSCGYFIDRPYYSPMNCTDCKPRSAHVFNLSVPDTTIKDLSPTLLPFLNNIQPHRLSWVYIGKSDNIHAIDAVGCAWTHPSVDKQNMLTSDGITQIPAVMSHALEGNANVVKGPGSTGGNLVRLGPQSKMLLNIMLPSKLTEYRLRIRCANQRAGSLILSTGLAQVEIFIPINSHYHHTLNYRSFQVINVPEYFILSIKETSRYTLQLGNLSEEIIIDKIEFLPVL

SEQ ID NO: 144 - protein, 680 aa, Artificial sequence
  Variant of native sequence
MNFKQNFNTIPPAANSFRFTSHPNLFTYEHAHMFKNNRYYLSQNQMNQLRTICEFNDPFGNTLRNYVTASAGLVAVLAGVATPVVAPLVVAGGVVNLFLPLLWPEDSTAKDQKLMCEVGALIDKKLNNFVYEQATKQLEGLEAVIGEYRKAVKSFHEKRLPRDVGAEWVRTQFQIVHSAIKNAIPLFRLKEYEVTLLPLYCKLANTHLLLLRDIAAFGGEYGFTPKILDSYYIDLKEGTGIYTEHCVNTYDVGLELAKKRKATINTNGNNPQYPWMFFRTIETYDYQGVEDWNLFNAYRRIMTLLVLDWIAMWPTFDFKLYPTHMGLKTALTREIYTNIVGYHTLKKEFYWPWDDKPTLKREQIEKEFVRPPHLFTWINQIDVRKSNVNDYITGMVLKDSHTLNPNIHTTYMGTLENTSSSCNILNFPITKVSVKFNGREKINFIEFTSNNNILSSCGYFIDRPYYSPMNCTDCKPRSAHVFNLSVPDTTIKDLSPTLLPFLNNIQPHRLSWVYIGKSDNIHAIDAVGCAWTHPSVDKQNMLTSDGITQIPAVMSHALEGNANVVKGPGSTGGNLVRLGPQSKMLLNIMLPSKLTEYRLRIRCANQRAGSLILSTGLAQVEIFIPINSHYHHTLNYRSFQVINVPEYFILSIKETSRYTLQLGNLSEEIIIDKIEFLPVL

SEQ ID NO: 145 - protein, 679 aa, Artificial sequence
  Variant of native sequence
LNFKQNFNTIPPAANSFRFTSHPNLFTYEHAHMFKNNRYYLSQNQMNQLRTICEFNDPFGNTLRNYVTASAGLVAVLAGVATPVVAPLVVAGGVVNLFLPLLWPEDSTAKDQKLMCEVGALIDKKLNNFVYEQATKQLEGLEAVIGEYRKAVKSFHEKRLPRDVGAEWVRTQFQIVHSAIKNAIPLFRLKEYEVTLLPLYCKLANTHLLLLRDIAAFGGEYGFTPKILDSYYIDLKEGTGIYTEHCVNTYDVGLELAKKRKATINTNGNNPQYPWMFFRTIETYDYQGVEDWNLFNAYRRIMTLLVLDWIAMWPTFDFKLYPTHMGLKTALTREIYTNIVGYHTLKKEFYWPWDDKPTLKREQIEKEFVRPPHLFTWINQIDVRKSNVNDYITGMVLKDSHTLNPNIHTTYMGTLENTSSSCNILNFPITKVSVKFNGREKINFIEFTSNNNILSSCGYFIDRPYYSPMNCTDCKPRSAHVFNLSVPDTTIKDLSPTLLPFLNNIQPHRLSWVYIGKSDNIHAIDAVGCAWTHPSVDKQNMLTSDGITQIPAVMSHALEGNANVVKGPGSTGGNLVRLGPQSKMLLNIMLPSKLTEYRLRIRCANQRAGSLILSTGLAQVEIFIPINSHYHHTLNYRSFQVINVPEYFILSIKETSRYTLQLGNLSEEIIIDKIEFLPV

SEQ ID NO: 146 - protein, 1022 aa, Bacillus sp.
MVNKKIHADGIHDQISPYINIVLHFTFIKGGYFMPISKEPILYPSVSSTPNEFFTFDWNWGLHKVLDQVTGLVKFIPGIGILAGPYSALLRYVYGDVIDELFPKTDANGNSTTDLTLLFQTFMAAAEQMMDQKISNTVKETAIAQLKALHQDLLVFQQALDNLKNNQNPNDEDKLKSEVQTKFGIVHTFFVNNIAQFTISGYEVELLSTYAQAANLHLMFLRTVQEKGTEWGFAQATIDGYYDSPGSGLGFKQLIEKYTNYCMKHYNDGLQKIKVATVNLCAKRDDNQNDNDNPSYYNQYLYDPYADLGTAICQHSLGSLSTGCGGVNFSSHPICKDEIISSRIHSQYMQSVKNWNQYNEYVQTMQVTVLDLVAIWPYWDYKNYPDGAKKELTREIYTDIHGSPDGFNKSIDSLSQALLPQPRLFTFLQQLDFHTDDYKTEVATHAPTTGKPNALYHYIDGEIIVGIDQHFINTNGQQILQPQGSSNTGRTHAVSGDFTKIQVGSWFEPRCVVIGQSAGFDDVIGSINDDSPWYNIADGRVYIAYQEIRGLGATSMVSNGVHKIIGADEQIDSHVISYVKFTPTTHPQTLFVNSGKQLGSLTTGWTSTTVDSQNTVVTDSITSIPVVKAHSITDFPIPGGVVKGPGHTGGDLVKLPPNSRAKLMVNMRDISASYDIRIRYATPSDDGKLNLKYWNGSSDVSITSTSLTNTGGNTDFNHFQYAMLTTDDVKFKAPFSPVEILLENTGANDLFLDRIEFIPTMPTSSFNDQSFSVGSNTTHLRNYTVWELLSTPFIEPVVINITGTLVNSASLSFQFLDIHNNVLLTKTVSGDGPSCHVIHNEMPAHGNSCSDKSSEFIIYETISQDLYKIQLFEESNATTNTDSGPLDNKYENVQGLINPSTPNTVVIPAHTVTYEMANDDRAYIVWEKNRSLALSIQNLTVISNSSTPIQLYIKRNDNAVATGVKATRVETNNDTQQYTFIFENVSPDGGFDFVSLDFSGNFDSSRYPLQVSGTLLLAPNNS

SEQ ID NO: 147 - protein, 727 aa, Artificial sequence
  Variant of native sequence
MPISKEPILYPSVSSTPNEFFTFDWNWGLHKVLDQVTGLVKFIPGIGILAGPYSALLRYVYGDVIDELFPKTDANGNSTTDLTLLFQTFMAAAEQMMDQKISNTVKETAIAQLKALHQDLLVFQQALDNLKNNQNPNDEDKLKSEVQTKFGIVHTFFVNNIAQFTISGYEVELLSTYAQAANLHLMFLRTVQEKGTEWGFAQATIDGYYDSPGSGLGFKQLIEKYTNYCMKHYNDGLQKIKVATVNLCAKRDDNQNDNDNPSYYNQYLYDPYADLGTAICQHSLGSLSTGCGGVNFSSHPICKDEIISSRIHSQYMQSVKNWNQYNEYVQTMQVTVLDLVAIWPYWDYKNYPDGAKKELTREIYTDIHGSPDGFNKSIDSLSQALLPQPRLFTFLQQLDFHTDDYKTEVATHAPTTGKPNALYHYIDGEIIVGIDQHFINTNGQQILQPQGSSNTGRTHAVSGDFTKIQVGSWFEPRCVVIGQSAGFDDVIGSINDDSPWYNIADGRVYIAYQEIRGLGATSMVSNGVHKIIGADEQIDSHVISYVKFTPTTHPQTLFVNSGKQLGSLTTGWTSTTVDSQNTVVTDSITSIPVVKAHSITDFPIPGGVVKGPGHTGGDLVKLPPNSRAKLMVNMRDISASYDIRIRYATPSDDGKLNLKYWNGSSDVSITSTSLTNTGGNTDFNHFQYAMLTTDDVKFKAPFSPVEILLENTGANDLFLDRIEFIPT

SEQ ID NO: 148 - protein, 989 aa, Artificial sequence
  Variant of native sequence
MPISKEPILYPSVSSTPNEFFTFDWNWGLHKVLDQVTGLVKFIPGIGILAGPYSALLRYVYGDVIDELFPKTDANGNSTTDLTLLFQTFMAAAEQMMDQKISNTVKETAIAQLKALHQDLLVFQQALDNLKNNQNPNDEDKLKSEVQTKFGIVHTFFVNNIAQFTISGYEVELLSTYAQAANLHLMFLRTVQEKGTEWGFAQATIDGYYDSPGSGLGFKQLIEKYTNYCMKHYNDGLQKIKVATVNLCAKRDDNQNDNDNPSYYNQYLYDPYADLGTAICQHSLGSLSTGCGGVNFSSHPICKDEIISSRIHSQYMQSVKNWNQYNEYVQTMQVTVLDLVAIWPYWDYKNYPDGAKKELTREIYTDIHGSPDGFNKSIDSLSQALLPQPRLFTFLQQLDFHTDDYKTEVATHAPTTGKPNALYHYIDGEIIVGIDQHFINTNGQQILQPQGSSNTGRTHAVSGDFTKIQVGSWFEPRCVVIGQSAGFDDVIGSINDDSPWYNIADGRVYIAYQEIRGLGATSMVSNGVHKIIGADEQIDSHVISYVKFTPTTHPQTLFVNSGKQLGSLTTGWTSTTVDSQNTVVTDSITSIPVVKAHSITDFPIPGGVVKGPGHTGGDLVKLPPNSRAKLMVNMRDISASYDIRIRYATPSDDGKLNLKYWNGSSDVSITSTSLTNTGGNTDFNHFQYAMLTTDDVKFKAPFSPVEILLENTGANDLFLDRIEFIPTMPTSSFNDQSFSVGSNTTHLRNYTVWELLSTPFIEPVVINITGTLVNSASLSFQFLDIHNNVLLTKTVSGDGPSCHVIHNEMPAHGNSCSDKSSEFIIYETISQDLYKIQLFEESNATTNTDSGPLDNKYENVQGLINPSTPNTVVIPAHTVTYEMANDDRAYIVWEKNRSLALSIQNLTVISNSSTPIQLYIKRNDNAVATGVKATRVETNNDTQQYTFIFENVSPDGGFDFVSLDFSGNFDSSRYPLQVSGTLLLAPNNS

SEQ ID NO: 149 - protein, 760 aa, Artificial sequence
  Variant of native sequence
MVNKKIHADGIHDQISPYINIVLHFTFIKGGYFMPISKEPILYPSVSSTPNEFFTFDWNWGLHKVLDQVTGLVKFIPGIGILAGPYSALLRYVYGDVIDELFPKTDANGNSTTDLTLLFQTFMAAAEQMMDQKISNTVKETAIAQLKALHQDLLVFQQALDNLKNNQNPNDEDKLKSEVQTKFGIVHTFFVNNIAQFTISGYEVELLSTYAQAANLHLMFLRTVQEKGTEWGFAQATIDGYYDSPGSGLGFKQLIEKYTNYCMKHYNDGLQKIKVATVNLCAKRDDNQNDNDNPSYYNQYLYDPYADLGTAICQHSLGSLSTGCGGVNFSSHPICKDEIISSRIHSQYMQSVKNWNQYNEYVQTMQVTVLDLVAIWPYWDYKNYPDGAKKELTREIYTDIHGSPDGFNKSIDSLSQALLPQPRLFTFLQQLDFHTDDYKTEVATHAPTTGKPNALYHYIDGEIIVGIDQHFINTNGQQILQPQGSSNTGRTHAVSGDFTKIQVGSWFEPRCVVIGQSAGFDDVIGSINDDSPWYNIADGRVYIAYQEIRGLGATSMVSNGVHKIIGADEQIDSHVISYVKFTPTTHPQTLFVNSGKQLGSLTTGWTSTTVDSQNTVVTDSITSIPVVKAHSITDFPIPGGVVKGPGHTGGDLVKLPPNSRAKLMVNMRDISASYDIRIRYATPSDDGKLNLKYWNGSSDVSITSTSLTNTGGNTDFNHFQYAMLTTDDVKFKAPFSPVEILLENTGANDLFLDRIEFIPT

SEQ ID NO: 150 - protein, 524 aa, Bacillus sp.
LNVTLSFIYTILFFGQLSSHTIQTKGGHVMTISHVVNPIFTKQEQLDQITNSVNNLFSSSSSSLSQGVSDYWIDQVLLKVNALSDRIFPAQKEQLHQRLAQAKQISKARNLLVGGNFETLERWKLSQNAVLVSDHELFQGYHLELPPAIDPVKHPSYAYQIIAENKLKANTRYYVSGFIAQGYQLEIMVSRYGQEHSQIVYVPAEMAKPISADTEPNCCTPHPCSCAACNEEDIDSHFFQIPIDVKNLYHAQSPGIEIGFKVTSTEGFAKLSNIEVFEGRPLTAAEQRKVLRLENDWKEEQQTKQTEHAQFIQQIQQRFNMLYTTPEHHTLRTETSYQQLLETTIPPFHNIYHWFMPDVPDSDYAFYYDLQQKLERGWDQYFSRNLLENGDFLEPLDDSWYKQGTVSLQTINQNTMLRLQHWDSLIRTNVSLPVVNEDAEYVIRVIGKGTGSVLIQNGNTTNKLVFTNSRQMETKEFYLQPEGAQISLTIRSDTNEFLVNTVEIILINDGSEKDQGPGMFPTMN

SEQ ID NO: 151 - protein, 634 aa, Bacillus sp.
MSRNKDCNCNDGFQKSDMSDRYPYANDTKAALQNMDYKDWLMMNQGEELNGLDPKDGVNTAVAMVGTLMWTFGNPAFTGPLGGVICAFGLLIPILWPDDEEPKKVWQQFMNDGETFFGKKIQDNERNRALAYLEAIKNKLKDYELALEMWKKDKNKDTASRVSTEFNDVEGEIVSALPHLKLKDYEPVLLTCYAQAALLHLNLLNQGVVFQDEWDGHKSSRSLLNSGFWKRKLMGCIGEYIDYCTKTYTEGLDILKNASGMKWPIYNAYRRDMTLAVLDLVALFPNYDVDKYSKATKTELTREIYMTLSNRIIDSDIDFDTAEASLTRTPHIFTWLRGMSYYTREESNINKKDCLGDILHKYQYTNNSTINFKSRYRYKQDINIESDKMKITKLTVQRYNTSKSDPIPNGIQEMKWNISMPLESVEKTPYTVSKKWENKKINDVYIPSMKPVIKNQQRYGHQLSSILVHSQTHGNFGHVYIYSFGWTHDGVDRENTIAKDTITQIPAVKALSQNEDVVKGPGHTGGDLVRMKGVNTNILKIKCKGTQGKKYKVRIRYAANGDGELICDIHKERYRLKVTKTYSDDNYEKYASFQYIDFDGDILIDKNFMIKIFGNSNIKTSILIDKIEFISLED

SEQ ID NO: 152 - protein, 632 aa, Artificial sequence
  Variant of native sequence
MSRNKDCNCNDGFQKSDMSDRYPYANDTKAALQNMDYKDWLMMNQGEELNGLDPKDGVNTAVAMVGTLMWTFGNPAFTGPLGGVICAFGLLIPILWPDDEEPKKVWQQFMNDGETFFGKKIQDNERNRALAYLEAIKNKLKDYELALEMWKKDKNKDTASRVSTEFNDVEGEIVSALPHLKLKDYEPVLLTCYAQAALLHLNLLNQGVVFQDEWDGHKSSRSLLNSGFWKRKLMGCIGEYIDYCTKTYTEGLDILKNASGMKWPIYNAYRRDMTLAVLDLVALFPNYDVDKYSKATKTELTREIYMTLSNRIIDSDIDFDTAEASLTRTPHIFTWLRGMSYYTREESNINKKDCLGDILHKYQYTNNSTINFKSRYRYKQDINIESDKMKITKLTVQRYNTSKSDPIPNGIQEMKWNISMPLESVEKTPYTVSKKWENKKINDVYIPSMKPVIKNQQRYGHQLSSILVHSQTHGNFGHVYIYSFGWTHDGVDRENTIAKDTITQIPAVKALSQNEDVVKGPGHTGGDLVRMKGVNTNILKIKCKGTQGKKYKVRIRYAANGDGELICDIHKERYRLKVTKTYSDDNYEKYASFQYIDFDGDILIDKNFMIKIFGNSNIKTSILIDKIEFISL

SEQ ID NO: 153 - protein, 240 aa, Bacillus sp.
MKGECKMTSIYLKKNECIRNLRNSPYRRITLTVPCENKGNLKNIFQVEPQYINQALAASHAFQGAIDSNLHFNYERAYQIGVNMPGRDYDPSMWGINQPVIQETLQVSTMINQLKSSLNRFLYFIDISNELFWNEVESAIVNTFTNLYTQQNSAWIFYHSSTSTSTSYYYNIMFALQDSNYRTMIVIPIAFDITVRLEKQKVLFITLKDRAEYRVTLKSIWVRLILQKTHGKQLVDCFNF

SEQ ID NO: 154 - protein, 234 aa, Artificial sequence
  Variant of native sequence
MTSIYLKKNECIRNLRNSPYRRITLTVPCENKGNLKNIFQVEPQYINQALAASHAFQGAIDSNLHFNYERAYQIGVNMPGRDYDPSMWGINQPVIQETLQVSTMINQLKSSLNRFLYFIDISNELFWNEVESAIVNTFTNLYTQQNSAWIFYHSSTSTSTSYYYNIMFALQDSNYRTMIVIPIAFDITVRLEKQKVLFITLKDRAEYRVTLKSIWVRLILQKTHGKQLVDCFNF

SEQ ID NO: 155 - protein, 730 aa, Bacillus sp.
MNSNDQNGYSNISAKSINTVRYPLANDNTTALKNMNYKEYLRMSERYNTKNSGDLNVMINGKDAVKTAIGIVGKLLSTLGVPGVGLMVSLYAALVDAVWPNGKSQWEIFMEQVEDLINQKIAEYARSKALAELEGLGDNFQLYLNALTAWKENPDDASILHEVQYRFENLDGFFTQYMPSFRVSGYEVPLLTVYAQAANLHLLLLRDASVFGEEWGFSPTLVDNYYNRQMDLTANYSDHCVKWYNIGLGNLSGSTAHQWLDYNRFRTQMTLTVLDIVALFQNYDVRTYKIATTSQLTREVYTEPIGIEGQYSWYDKAPSFSAIESTVIREPHVFDSLTGFSIYTGLSRYSASNYLYLWQGHKTFHQQIGSPYSFSDIHGNIKNYSSISELDFYGGDVYRTQSTAGVLFAYTTPYYGVPKVDFNIVNPLNNNRDTVTYNPGNEGIGAQTHDSEVELPPETIDQPDYEVYSHKLCHAGMIQFPNNPHNPYVPVFSWSHRSADNTNTIYSDRITQIPAIKSLPEGNWGGVEKGPGFTGGDVTMARYENGDTLKDVVKLHVTIDPDALSQKFRVRLRYASTSNIPATLFTSDSGDRGFDLKATGQSPFTGYNDFQYVDVPGVITFTKTSDLVTVYLHMYAAQNSTIYIDKVEFIPLDETYEAEKDLNTAKKAVNALFTNTKEALKIDVTDYQVNQAQNLVECLSDDLYPDEKQLLFDAVKEAKRLGQVRNFIQK

SEQ ID NO: 156 - protein, 652 aa, Artificial sequence
  Variant of native sequence
MNSNDQNGYSNISAKSINTVRYPLANDNTTALKNMNYKEYLRMSERYNTKNSGDLNVMINGKDAVKTAIGIVGKLLSTLGVPGVGLMVSLYAALVDAVWPNGKSQWEIFMEQVEDLINQKIAEYARSKALAELEGLGDNFQLYLNALTAWKENPDDASILHEVQYRFENLDGFFTQYMPSFRVSGYEVPLLTVYAQAANLHLLLLRDASVFGEEWGFSPTLVDNYYNRQMDLTANYSDHCVKWYNIGLGNLSGSTAHQWLDYNRFRTQMTLTVLDIVALFQNYDVRTYKIATTSQLTREVYTEPIGIEGQYSWYDKAPSFSAIESTVIREPHVFDSLTGFSIYTGLSRYSASNYLYLWQGHKTFHQQIGSPYSFSDIHGNIKNYSSISELDFYGGDVYRTQSTAGVLFAYTTPYYGVPKVDFNIVNPLNNNRDTVTYNPGNEGIGAQTHDSEVELPPETIDQPDYEVYSHKLCHAGMIQFPNNPHNPYVPVFSWSHRSADNTNTIYSDRITQIPAIKSLPEGNWGGVEKGPGFTGGDVTMARYENGDTLKDVVKLHVTIDPDALSQKFRVRLRYASTSNIPATLFTSDSGDRGFDLKATGQSPFTGYNDFQYVDVPGVITFTKTSDLVTVYLHMYAAQNSTIYIDKVEFIPL

SEQ ID NO: 157 - protein, 237 aa, Bacillus sp.
MYNLKLNEVEKNQIFHRSPSRDITLMVPSIDESSLKNIFQLEPQYIHQALSASNAFQGAIGSDLNFDFNKAWEIGQNLPRLNMLLSGLNDTVVQETLQVSSMISKLKGILKEYLYFIDISNTTFWNEVEATITNTFTNLYTQTNSAWIFFYRSTSTSTSYYYNTLFAIQYASFMIVVPIVFEITVSLEKQKVLFITIKDRSEYRVTMKLIIAFLSLQGNRNKSIEDVFYPKTKILYR

SEQ ID NO: 158 - protein, 403 aa, Bacillus sp.
LKTNKWLRTIPTACLLSSAILVLPTSSFAATDMSSCSKNDYSQSCVEQTDPGVNNRTHAMYETINRLVEMDDLNEQTNWSGKSWYNFIRFNYLILPSQEQDVLNQLNSIPKDNVELKQVLKALNGYHNRTNTITDTNTLQISNVNVNKYIEDPKPDPNSDQYREIDTKAINESYSQTLTKKTQNITESIQSSKQLTVTHSLNTGVKEGLKSSIGVSVPIIGEVKGELSFEYSLNYGYTNASATIDTITHTVTSPQEDISLAPRTGAVVTAKLSTPVYKTKLLGTSRIKGYYTDQVNSYSTWVQLGIYNKFKVISQHNPTIWNKLKELGFSLDDQTKEVIFNGVIDLTDRHAPGSTFESRTQIYELDANGNINYNKPVGKPQTTEGQVQKSNISNNTSRLLLVK

SEQ ID NO: 159 - protein, 403 aa, Artificial sequence
  Variant of native sequence
MKTNKWLRTIPTACLLSSAILVLPTSSFAATDMSSCSKNDYSQSCVEQTDPGVNNRTHAMYETINRLVEMDDLNEQTNWSGKSWYNFIRFNYLILPSQEQDVLNQLNSIPKDNVELKQVLKALNGYHNRTNTITDTNTLQISNVNVNKYIEDPKPDPNSDQYREIDTKAINESYSQTLTKKTQNITESIQSSKQLTVTHSLNTGVKEGLKSSIGVSVPIIGEVKGELSFEYSLNYGYTNASATIDTITHTVTSPQEDISLAPRTGAVVTAKLSTPVYKTKLLGTSRIKGYYTDQVNSYSTWVQLGIYNKFKVISQHNPTIWNKLKELGFSLDDQTKEVIFNGVIDLTDRHAPGSTFESRTQIYELDANGNINYNKPVGKPQTTEGQVQKSNISNNTSRLLLVK

SEQ ID NO: 160 - protein, 658 aa, Bacillus sp.
MNRNKDCNCNDGFQKIDMSDRYPYVNDPNAALQNMDYKDWLVMSQGDGQNGLDLGIRDGGTVSGVSAGMIVVGTIMTAFSGAISPGIILISIGTLLPILWPDDKEPKKVWQQFMNDGETLFGKKIQDNERNRALAYLEAIKKKLNDYERALEAWKKDKNKITANRVSMEFNDAEGEIESALPHLKLKGYEPVLLTCYVQAAMLHLNLLQQGVALQDEWDKYLLSSRTSTFWKEKLTGTEKEPGCIEEYIDYCTKAYHEGLNILKNASDITWYTYDTYRTEMTLIVLDLIALFPNYDVGRYPKGTRLELTREIYTPLKCDHLPLSGPKGIEDGESYLKRKPHLFTWLKQFNLVTGQRNELKYLSGIRNFYSYTNSREVQADKLNNENLGGEKNLVRWGRDLSVYGIDVTRNIDNLRPPLAGARFANQVKRLKFSLGVRNKEKWEKKEEKGYDSAGKGPYGQKSEFLPPVINDTNFGKNHRLSYIARLKKMPTLGHSDAYVYSFAWTHYSIDRKNTIVKDIITQIPAVKALNQNEDFFVVRGPGYTGGDVVQLDGFSKEGLTLKCRVFRGRKYKIRLRYAANQDTKLKMIVPESDGNSASLEIKGTFSGDNYEKYKSFQYLETGVEVHFKNREFVITFKHENFSSTKLLIDKIEFIPQEN

SEQ ID NO: 161 - protein, 656 aa, Artificial sequence
  Variant of native sequence
MNRNKDCNCNDGFQKIDMSDRYPYVNDPNAALQNMDYKDWLVMSQGDGQNGLDLGIRDGGTVSGVSAGMIVVGTIMTAFSGAISPGIILISIGTLLPILWPDDKEPKKVWQQFMNDGETLFGKKIQDNERNRALAYLEAIKKKLNDYERALEAWKKDKNKITANRVSMEFNDAEGEIESALPHLKLKGYEPVLLTCYVQAAMLHLNLLQQGVALQDEWDKYLLSSRTSTFWKEKLTGTEKEPGCIEEYIDYCTKAYHEGLNILKNASDITWYTYDTYRTEMTLIVLDLIALFPNYDVGRYPKGTRLELTREIYTPLKCDHLPLSGPKGIEDGESYLKRKPHLFTWLKQFNLVTGQRNELKYLSGIRNFYSYTNSREVQADKLNNENLGGEKNLVRWGRDLSVYGIDVTRNIDNLRPPLAGARFANQVKRLKFSLGVRNKEKWEKKEEKGYDSAGKGPYGQKSEFLPPVINDTNFGKNHRLSYIARLKKMPTLGHSDAYVYSFAWTHYSIDRKNTIVKDIITQIPAVKALNQNEDFFVVRGPGYTGGDVVQLDGFSKEGLTLKCRVFRGRKYKIRLRYAANQDTKLKMIVPESDGNSASLEIKGTFSGDNYEKYKSFQYLETGVEVHFKNREFVITFKHENFSSTKLLIDKIEFIPQ

SEQ ID NO: 162 - protein, 735 aa, Bacillus sp.
MNFHDCNNSNLKNYETPFPRSSTHSRVQSLREKALALNYFTLEEEKESLTYIQQILQVQSPELENTMDTVSVLSTNLSAHIQYSKKIGDLPCPENFQFKNDYLVPTSTTPLNLFPMLAGLVPWAATSIAKYAANKALTEVLNIIFPGSSTPTLDQVQDIVQKEIHKSLSADLQGRLHAKYNGLLEQLDQFNDLLCHFCPPSATNCNEYGICPSTLPEKDFIALLTQFQYVDSEFRGAMEEFIYDPSAPGFEEILLPLYTLVGTTHLTFLKTAIYQAENWRFTENYTALLKNHYNENLYEYTADSLNMYNKGFQNVIENKDLSTGDVLQFKTAMTLALDQVYAWSLMRYEGLQYRLARSYWHWAGPQYFGINAYKITLQKWPALYQYMNGPLNYRLQNILYGKKEGLNASGYYSQYMFRTFPITSYDPGDKGQLAPYPGYTGTGYETDFFKTENFEIINKVKTYMYYNSFGGQVYTTIELWKDNDSISKLMGRWPTTNEIYYENTFLRSFIKDISVYNISEQKFTEALEYIYTRSIPVQYQANNSIILGFTPITEWDYFKNKVQTLKSYSEENPALSIPPTQFFDITRLDNVQFQEKQGQGIDGNLTLDGNSGPNRVRYRIKLDSSLSIETKYRLFFRVVGGSGWSSPVISPVTYSETDCSTCDNDDLILKMNLIGSGALSDPQYFYDYISDPFQMNQAPGKDIDLSIICTENNFLQFAQIQIVPAAFFKTIINPK

SEQ ID NO: 163 - protein, 810 aa, Bacillus sp.
MNQYNNKNDYEIIDNADMYYQPKYPLAEAPCSELQQISYEKVMNTSVGRKYQAVQQVNVGESVSAALGILATILKAVNPTLGAAAGVISKIFGFLWKQFGTDSQAQWKQFMEAVEYLVNQKITDAVRSKAVSELAGVQNALELYQEAADDWNINPNDTSAKERIRRQFSSTNTTIEFAMPSFRVSGFEVPLLTVFAQAANLHLLLLRDAVKFGNEWGMPAAEVEDYYTRLQKRTAEYTDYCTNTYDKGLKQAYDLAPNPTDYNKYPYLNPYSKDPIYGKYYTAPVDWNLFNDFRRDMILMVLDIVAVWPTYNPKIYNNPYGVQIQLSREVYSTVYGRGWTNNSSVDAIEYTLVRPPHLVTELKKLTFDERNLFEAETVPIAFSKVTNTLQYVGSSTTWEQSFSVPPIASIKTVHNVSATDIGNLSLSLGAVPFGFSFYNKNDNPITTVGYSGGWWNGIPKDEGSNQNSHHLSYVAALETQTTAGWFPTYPVPLLGEWGFGWLHNSLTSTNTIVTDRTTQVPAVKGNAAEFGATVVRGPGSTGGDLVKLSAYNGGSTQLRIVVRPSATARTRPYKLRIRYASEGNANLFVGKYVVNRWWETGNFAVDRTFSGAMTYNSFKYLDAFNFAANEEEFKIEFRCNSGGPIYIDKIEFIPVNPIPEPEPPKPPEPLKGTYQIRAYLTSNVASLFINSASQPDRELLTIQKNYNQDTQKWKLVYDEGKKAYQIKSLANENLVLTWVSPDFAKGITNHSYSSQYWIIEDAGDDGYVYLRNYANDMLALDLPSSMYGMYFTVKPFDRSSRQRFRFNKLS

SEQ ID NO: 164 - protein, 655 aa, Artificial sequence
  Variant of native sequence
MNQYNNKNDYEIIDNADMYYQPKYPLAEAPCSELQQISYEKVMNTSVGRKYQAVQQVNVGESVSAALGILATILKAVNPTLGAAAGVISKIFGFLWKQFGTDSQAQWKQFMEAVEYLVNQKITDAVRSKAVSELAGVQNALELYQEAADDWNINPNDTSAKERIRRQFSSTNTTIEFAMPSFRVSGFEVPLLTVFAQAANLHLLLLRDAVKFGNEWGMPAAEVEDYYTRLQKRTAEYTDYCTNTYDKGLKQAYDLAPNPTDYNKYPYLNPYSKDPIYGKYYTAPVDWNLFNDFRRDMILMVLDIVAVWPTYNPKIYNNPYGVQIQLSREVYSTVYGRGWTNNSSVDAIEYTLVRPPHLVTELKKLTFDERNLFEAETVPIAFSKVTNTLQYVGSSTTWEQSFSVPPIASIKTVHNVSATDIGNLSLSLGAVPFGFSFYNKNDNPITTVGYSGGWWNGIPKDEGSNQNSHHLSYVAALETQTTAGWFPTYPVPLLGEWGFGWLHNSLTSTNTIVTDRTTQVPAVKGNAAEFGATVVRGPGSTGGDLVKLSAYNGGSTQLRIVVRPSATARTRPYKLRIRYASEGNANLFVGKYVVNRWWETGNFAVDRTFSGAMTYNSFKYLDAFNFAANEEEFKIEFRCNSGGPIYIDKIEFIPV

SEQ ID NO: 165 - protein, 571 aa, Bacillus sp.
MDLKGGYSMNEDIIKAREAVQSLFSNPTTLQVNATDYQVDQAAKLVECISDPIYTKEKMCLLEQVKLAKRLSRTRNLLNYGDFESPKWWEENGWKTSTYVSVRSDNPIFTGRYLHLPSAYQPQLSNRIFPTYAYQKIEESKLKPYTRYSLRAFIGNSTDLEVFAIRYDKDVHKKMCVPNDIIPTNPCTGEYLLKQNCHPVVTNQVIPQNTFYDSYGNGSHRIIQQTSTVCTDPHEWQCHIDTGELDMIQNLGIWVGFKIGTTDGIATIDNVEVVEVGPLTGDALTRMKKREQRWQKKWAEKQMRIERDVQAANQAIQALFTDSNQNQLQSTITLKQILEAETWVEQIPYVYNPFLVGAIPVVPGETYDIVQQLAITIGIARGLYTQRNLVRNGDFTAGLANWNATEGAEVQQIGNISILKLSDWSATVSQHVCVKPEHSYLLRVTARKEDTGEGYVTISDGTIDNTETLNFTVEEGTTSIMNYASNPYETNAYPNNITNNKEIGCGCYDNYRCCHNHDEYPIMEQNTLDLSNYITKTVEIFPETNHVCIEIGETAGTFEVASIELIAIECE

SEQ ID NO: 166 - protein, 318 aa, Bacillus sp.
MKNNKKKKQILSLAMLASIGTSFGIISPDSVSAAQTIPIQNTIQEQRNVSISDWRKPLENTYKAMRLRDPIQYLSESPYLTLDGVYQSSVEADGSPIITNSNSLFVGRATLTNYTDRDQTLTTNEFSKTFENSVTNSTTNGFNLGVSASSTFKIPLIGETSIELSTEYNFSNTNETTKTESYTYTATPQNIVVAANSSVEVIVNLNTAKLSGNVKLLSYLNGKIGYNSYKPNQVTSSWLTVFLRSAAPSEIDSNLQIDPADPFKGVYLVGKGKYSAEYGTEFVVTVRPVEKPNKFSAKLSESTNEGYTYTVKPEVKKN

SEQ ID NO: 167 - protein, 286 aa, Artificial sequence
  Variant of native sequence
MAQTIPIQNTIQEQRNVSISDWRKPLENTYKAMRLRDPIQYLSESPYLTLDGVYQSSVEADGSPIITNSNSLFVGRATLTNYTDRDQTLTTNEFSKTFENSVTNSTTNGFNLGVSASSTFKIPLIGETSIELSTEYNFSNTNETTKTESYTYTATPQNIVVAANSSVEVIVNLNTAKLSGNVKLLSYLNGKIGYNSYKPNQVTSSWLTVFLRSAAPSEIDSNLQIDPADPFKGVYLVGKGKYSAEYGTEFVVTVRPVEKPNKFSAKLSESTNEGYTYTVKPEVKKN

SEQ ID NO: 168 - protein, 422 aa, Bacillus sp.
VSTTTCKNIKYFILLILITIIIFQFSLNLAQAQTNTLFPKNIYVSLHNKTHGYTNAFTLSRYKKPFYMWGSHLHLSDHTSTLLRPNLQQQPFIGSEAQQFLFIPLDGGYYAIVNKENGQVIEESTTGDTLTNHTHPIKKTNLLMSGLWNGSDSQQWLIEKDKQTYHYYFRNKQSGKMMEVFKAEDYPDSGTPIHASEKQPVSRQLFVPNRNEAFPLPQCTIGKLGDIPHYQSYDTHLPETTQPVIVASTTLPAVMVKDSWEDKQKMQISPYYQLVKKQYWKKQEAHILAPGRERTITEIHGMTQIDVKSMTEKSGLTMKGDAGFTFQTLTASLSSTITHELDISRSTTIQDMQERKIENTIRNTSTEKIAWARYVLVSEYHLERADGTFVSTPWTYIHETDTRETVWPKEKIQQILMTSIEH

SEQ ID NO: 169 - protein, 391 aa, Artificial sequence
  Variant of native sequence
MQTNTLFPKNIYVSLHNKTHGYTNAFTLSRYKKPFYMWGSHLHLSDHTSTLLRPNLQQQPFIGSEAQQFLFIPLDGGYYAIVNKENGQVIEESTTGDTLTNHTHPIKKTNLLMSGLWNGSDSQQWLIEKDKQTYHYYFRNKQSGKMMEVFKAEDYPDSGTPIHASEKQPVSRQLFVPNRNEAFPLPQCTIGKLGDIPHYQSYDTHLPETTQPVIVASTTLPAVMVKDSWEDKQKMQISPYYQLVKKQYWKKQEAHILAPGRERTITEIHGMTQIDVKSMTEKSGLTMKGDAGFTFQTLTASLSSTITHELDISRSTTIQDMQERKIENTIRNTSTEKIAWARYVLVSEYHLERADGTFVSTPWTYIHETDTRETVWPKEKIQQILMTSIEH

SEQ ID NO: 170 - protein, 348 aa, Bacillus sp.
MMKYKNRTKMKLKYTKVLATVAILSLGMTAIGATFPAFAVENNHSQKINGEYYEQTDLDRFSQEVLEPKGYLAKSSGYTQISDLKETGQKVITLDSFPLENYTDKTRMMTVPTHSFKTSDGITNTTNKEFTFGQEIGFEAGIASIAGKITGKLSFQEKIGKSISEMHSTEETLSYGGETMEVAPHQKLKVEYTYIQKTYSGEAVNSKEIKGDVGSEIGALALRTEEDKYIYRYHGGKGNIGYLGADLDNIDKREPIELHDAYQIFKLVDNIDDGSIKLLEVHMPSKEEYYKLPRSEVKNRILFDAENQRVFFKDQLVNFSGVSGVEVIQKVTDEGTGEVIKEKQIVSF

SEQ ID NO: 171 - protein, 310 aa, Artificial sequence
  Variant of native sequence
MVENNHSQKINGEYYEQTDLDRFSQEVLEPKGYLAKSSGYTQISDLKETGQKVITLDSFPLENYTDKTRMMTVPTHSFKTSDGITNTTNKEFTFGQEIGFEAGIASIAGKITGKLSFQEKIGKSISEMHSTEETLSYGGETMEVAPHQKLKVEYTYIQKTYSGEAVNSKEIKGDVGSEIGALALRTEEDKYIYRYHGGKGNIGYLGADLDNIDKREPIELHDAYQIFKLVDNIDDGSIKLLEVHMPSKEEYYKLPRSEVKNRILFDAENQRVFFKDQLVNFSGVSGVEVIQKVTDEGTGEVIKEKQIVSF

SEQ ID NO: 172 - protein, 662 aa, Bacillus sp.
MSSYNKNQFEKPKELLSNSNSLIKCPLHPLANEPTAVLQGMDYKDWLVMCENNKGLGNPENFESIAEKATVAAASVVAAIVALMAAPVTGGTSAAAGFAILAGVLPLMFPEDEEKPSIFNDVMKATEELIDQKIDEIVKKKAESELEGLYNLLEHYQFAIKNWKEKNSDVDVSLAIDEVRFRFRAAHVAFTSAMAQFRIIGHELALLPVYAQAANLHLIFLKDAVMYERQWNLEKELHLEELLRVKEMYINHCTKWYRRGLEKIKDNSNKNWVDYNRYRRNMTILVLDIIALFPMYDAEKYNMLTKIETLTRKVYSDPLNYIKGESIAEDEKQYTRLPELYASLNKIGCQTKTTPDGKEEYLIGHTNTFFGTDSETSYEKKYGIAGNRGELIELADKAIWGLETYHSIKNPSIRKMVFNYNNIDKLYYNKENKKGTSQKNHGIAEEDKGEHHLSDMILAAWEGFEVEKSKAYSFAWRHNSIKSVNKIVDDKITQIPAVKASKIGSTVEVKEGEKGPTVKVERGPAFIGGDVVVSTAEQANPAHQLITNSIKIPVKVNVNEERDFKIRIRYATDHNINVCYTMHNAADSAYVHDTVERPISEIDKLNYGDFKYIEFGNRAKLNAGRHDLEIKLMYYDYQLKDSSKLKFVLDKVEFIPVEKKQV

SEQ ID NO: 173 - protein, 657 aa, Artificial sequence
  Variant of native sequence
MSSYNKNQFEKPKELLSNSNSLIKCPLHPLANEPTAVLQGMDYKDWLVMCENNKGLGNPENFESIAEKATVAAASVVAAIVALMAAPVTGGTSAAAGFAILAGVLPLMFPEDEEKPSIFNDVMKATEELIDQKIDEIVKKKAESELEGLYNLLEHYQFAIKNWKEKNSDVDVSLAIDEVRFRFRAAHVAFTSAMAQFRIIGHELALLPVYAQAANLHLIFLKDAVMYERQWNLEKELHLEELLRVKEMYINHCTKWYRRGLEKIKDNSNKNWVDYNRYRRNMTILVLDIIALFPMYDAEKYNMLTKIETLTRKVYSDPLNYIKGESIAEDEKQYTRLPELYASLNKIGCQTKTTPDGKEEYLIGHTNTFFGTDSETSYEKKYGIAGNRGELIELADKAIWGLETYHSIKNPSIRKMVFNYNNIDKLYYNKENKKGTSQKNHGIAEEDKGEHHLSDMILAAWEGFEVEKSKAYSFAWRHNSIKSVNKIVDDKITQIPAVKASKIGSTVEVKEGEKGPTVKVERGPAFIGGDVVVSTAEQANPAHQLITNSIKIPVKVNVNEERDFKIRIRYATDHNINVCYTMHNAADSAYVHDTVERPISEIDKLNYGDFKYIEFGNRAKLNAGRHDLEIKLMYYDYQLKDSSKLKFVLDKVEFIPV

SEQ ID NO: 174 - protein, 923 aa, Bacillus sp.
VIFLNFLKNTYYNMQVKHSGKVADVYDNTLDNNEDLVQYDWNDGNAQKWLFTPLNNNRYAIVNKNSGKVVEVYEENKNSGADIVQYEWDDGNSQQWEILGVEGGFNQIRNLNSGKVMDVRNNGENNEDQIIQYDWNNGDNQKWYFHPVGSFTLPSIQTYPRPAVPQYDYLGQELPDYVEPVVTNYTLAPCIAVEDPFYTDEKKISTGNQYYLYVREQYWLKVTDTILAPGMTHKYTQTSGIKETDLATVQKTVSHTFGADVGLSFKEGSLSAGMSYQYSEELMVQVTKVNEELNVVEKELTIHNNNPYDVSWTQYILVNKYYVRRADGTLVNEPWIVTDTNTTHAVYFPSTAAPGLLEDQVSIETSNAEKAVYNLFADAKHSTLKLDTTDYMIDEAARQVEQLSDKEYGLEKMQLFNVVRCAKQLSTKRNLLHYGDFESPNWQNPKDGWSASSNVTVLSDNPDFKGRYANMPGAKSMAPTYLYQKVDESKLKPYTRYLVRGFVGSSKELELFVTRYGKEVHRKMNIPMNTCSCSMGQVADYTMSNDPCQRTYPIYPSGMTLSSTEGLCEDKQHFVFQIDVGEIYQKADLGIGVGFKISSPSGMAQLDNIEVIEANPLTGEALARVKKREQKWKRELEQKCALTEKTVSSATQAVDSLFTNAQKNRLKATTTMQDILSAEEKVKAIPYVYNPYFEEVPGMNNTIFQALQSDVYNASSLYRIRNLIRNGDFSSGLSNWHATAGADVQERDGKSHVLVLSQWDATVSQEVCVQPERGYVLRVTARKEGSGKGYVTLTDCTADNTETVTFRSDDMVSTPRPSVPQRPVESGICDMTRYGESFGIVPEMNPVINEQPESYGTTSCSCGCGNMIQTPSTPSMPNVTGSSPGYITKTIEMFPETNRLRIEIGETEGTFLVESVELICMED

SEQ ID NO: 175 - protein, 923 aa, Artificial sequence
  Variant of native sequence
MIFLNFLKNTYYNMQVKHSGKVADVYDNTLDNNEDLVQYDWNDGNAQKWLFTPLNNNRYAIVNKNSGKVVEVYEENKNSGADIVQYEWDDGNSQQWEILGVEGGFNQIRNLNSGKVMDVRNNGENNEDQIIQYDWNNGDNQKWYFHPVGSFTLPSIQTYPRPAVPQYDYLGQELPDYVEPVVTNYTLAPCIAVEDPFYTDEKKISTGNQYYLYVREQYWLKVTDTILAPGMTHKYTQTSGIKETDLATVQKTVSHTFGADVGLSFKEGSLSAGMSYQYSEELMVQVTKVNEELNVVEKELTIHNNNPYDVSWTQYILVNKYYVRRADGTLVNEPWIVTDTNTTHAVYFPSTAAPGLLEDQVSIETSNAEKAVYNLFADAKHSTLKLDTTDYMIDEAARQVEQLSDKEYGLEKMQLFNVVRCAKQLSTKRNLLHYGDFESPNWQNPKDGWSASSNVTVLSDNPDFKGRYANMPGAKSMAPTYLYQKVDESKLKPYTRYLVRGFVGSSKELELFVTRYGKEVHRKMNIPMNTCSCSMGQVADYTMSNDPCQRTYPIYPSGMTLSSTEGLCEDKQHFVFQIDVGEIYQKADLGIGVGFKISSPSGMAQLDNIEVIEANPLTGEALARVKKREQKWKRELEQKCALTEKTVSSATQAVDSLFTNAQKNRLKATTTMQDILSAEEKVKAIPYVYNPYFEEVPGMNNTIFQALQSDVYNASSLYRIRNLIRNGDFSSGLSNWHATAGADVQERDGKSHVLVLSQWDATVSQEVCVQPERGYVLRVTARKEGSGKGYVTLTDCTADNTETVTFRSDDMVSTPRPSVPQRPVESGICDMTRYGESFGIVPEMNPVINEQPESYGTTSCSCGCGNMIQTPSTPSMPNVTGSSPGYITKTIEMFPETNRLRIEIGETEGTFLVESVELICMED

SEQ ID NO: 176 - protein, 809 aa, Bacillus sp.
LEGKDMHQNNIGKDKMRVSSNNTSKGNKGSMYPLASNSNTELRDSNYKDLVNMYKINNGDFLSSPRVLIDSKEVVSTAIEISTSVMSALGIPFASQIGQLWNFVLDQLWPSGENQWEKFMKHVEELINQKLTDFARDKALAELEGLGNVLGLYKEAIEDWKKDPTDVTSQERVRTRFRNTDAFFENGMPSFRIKNYEVPLLSVYASAANLHLLLLRDASIYGKDWGLNETNVKDNYNRQLKRTESYSNHCVTWYQKGLQRLKGSDADSWLKFNAFRRDMTFTVLDIVALFPCYDIQKYPMGIKTEITREIYTDPIGRLMRRPGFQNLDWVNNAPSFEEIEKETTGNPSMVTWINFLEISRNRFRGWNSSNDYWEGHVVHYKYSNDEDTNADGYGHFSGKFPTEAIYLENCDVYKISSLPVSMSTPYGDVTNFGVNKVHLEMLNLSDNTVQRGVWDYPNNWGGSWIDLEFLNKTSSIKEIQKYSHKLTHVSSFEVNIGSVLCYRWRHSSVDRNNTLDPQKITQIPAVKGHTPINCEVVRGTGLTGGDWLQLKGGGSFGLNISSVLPKTYRIRLRYSCGPKDVRLTVSCPDNGINKTITIPSTSTTSLANDLTYKDFKYIDLPIEFITNTAPKRYRINLRLEDVQNTSFFMDKFEFIPENETENRPLKIVTALNNSSVLAFAENSNFKEAILSNDKGEGSQKWRFIYDEEKKAYQIEDTYSPKLVLAWIIDSSKSRKVWATRSQNIDEHYWILEETSDGWYIIKNKKNQNLVLDVSNANPNNGTEIKVHEKHSSDAPEWDKKAQEWKLQRV

SEQ ID NO: 177 - protein, 804 aa, Artificial sequence
  Variant of native sequence
MHQNNIGKDKMRVSSNNTSKGNKGSMYPLASNSNTELRDSNYKDLVNMYKINNGDFLSSPRVLIDSKEVVSTAIEISTSVMSALGIPFASQIGQLWNFVLDQLWPSGENQWEKFMKHVEELINQKLTDFARDKALAELEGLGNVLGLYKEAIEDWKKDPTDVTSQERVRTRFRNTDAFFENGMPSFRIKNYEVPLLSVYASAANLHLLLLRDASIYGKDWGLNETNVKDNYNRQLKRTESYSNHCVTWYQKGLQRLKGSDADSWLKFNAFRRDMTFTVLDIVALFPCYDIQKYPMGIKTEITREIYTDPIGRLMRRPGFQNLDWVNNAPSFEEIEKETTGNPSMVTWINFLEISRNRFRGWNSSNDYWEGHVVHYKYSNDEDTNADGYGHFSGKFPTEAIYLENCDVYKISSLPVSMSTPYGDVTNFGVNKVHLEMLNLSDNTVQRGVWDYPNNWGGSWIDLEFLNKTSSIKEIQKYSHKLTHVSSFEVNIGSVLCYRWRHSSVDRNNTLDPQKITQIPAVKGHTPINCEVVRGTGLTGGDWLQLKGGGSFGLNISSVLPKTYRIRLRYSCGPKDVRLTVSCPDNGINKTITIPSTSTTSLANDLTYKDFKYIDLPIEFITNTAPKRYRINLRLEDVQNTSFFMDKFEFIPENETENRPLKIVTALNNSSVLAFAENSNFKEAILSNDKGEGSQKWRFIYDEEKKAYQIEDTYSPKLVLAWIIDSSKSRKVWATRSQNIDEHYWILEETSDGWYIIKNKKNQNLVLDVSNANPNNGTEIKVHEKHSSDAPEWDKKAQEWKLQRV

SEQ ID NO: 178 - protein, 652 aa, Artificial sequence
  Variant of native sequence
MHQNNIGKDKMRVSSNNTSKGNKGSMYPLASNSNTELRDSNYKDLVNMYKINNGDFLSSPRVLIDSKEVVSTAIEISTSVMSALGIPFASQIGQLWNFVLDQLWPSGENQWEKFMKHVEELINQKLTDFARDKALAELEGLGNVLGLYKEAIEDWKKDPTDVTSQERVRTRFRNTDAFFENGMPSFRIKNYEVPLLSVYASAANLHLLLLRDASIYGKDWGLNETNVKDNYNRQLKRTESYSNHCVTWYQKGLQRLKGSDADSWLKFNAFRRDMTFTVLDIVALFPCYDIQKYPMGIKTEITREIYTDPIGRLMRRPGFQNLDWVNNAPSFEEIEKETTGNPSMVTWINFLEISRNRFRGWNSSNDYWEGHVVHYKYSNDEDTNADGYGHFSGKFPTEAIYLENCDVYKISSLPVSMSTPYGDVTNFGVNKVHLEMLNLSDNTVQRGVWDYPNNWGGSWIDLEFLNKTSSIKEIQKYSHKLTHVSSFEVNIGSVLCYRWRHSSVDRNNTLDPQKITQIPAVKGHTPINCEVVRGTGLTGGDWLQLKGGGSFGLNISSVLPKTYRIRLRYSCGPKDVRLTVSCPDNGINKTITIPSTSTTSLANDLTYKDFKYIDLPIEFITNTAPKRYRINLRLEDVQNTSFFMDKFEFIPE

SEQ ID NO: 179 - protein, 657 aa, Artificial sequence
  Variant of native sequence
LEGKDMHQNNIGKDKMRVSSNNTSKGNKGSMYPLASNSNTELRDSNYKDLVNMYKINNGDFLSSPRVLIDSKEVVSTAIEISTSVMSALGIPFASQIGQLWNFVLDQLWPSGENQWEKFMKHVEELINQKLTDFARDKALAELEGLGNVLGLYKEAIEDWKKDPTDVTSQERVRTRFRNTDAFFENGMPSFRIKNYEVPLLSVYASAANLHLLLLRDASIYGKDWGLNETNVKDNYNRQLKRTESYSNHCVTWYQKGLQRLKGSDADSWLKFNAFRRDMTFTVLDIVALFPCYDIQKYPMGIKTEITREIYTDPIGRLMRRPGFQNLDWVNNAPSFEEIEKETTGNPSMVTWINFLEISRNRFRGWNSSNDYWEGHVVHYKYSNDEDTNADGYGHFSGKFPTEAIYLENCDVYKISSLPVSMSTPYGDVTNFGVNKVHLEMLNLSDNTVQRGVWDYPNNWGGSWIDLEFLNKTSSIKEIQKYSHKLTHVSSFEVNIGSVLCYRWRHSSVDRNNTLDPQKITQIPAVKGHTPINCEVVRGTGLTGGDWLQLKGGGSFGLNISSVLPKTYRIRLRYSCGPKDVRLTVSCPDNGINKTITIPSTSTTSLANDLTYKDFKYIDLPIEFITNTAPKRYRINLRLEDVQNTSFFMDKFEFIPE

SEQ ID NO: 180 - protein, 510 aa, Bacillus sp.
MNEKKEKQFMKIVTALDNESVVGKSEKFVKLTKNKETADQGWEFVYDVKKDAYQIKSASDKELVLTWTDEDFIRVNPNESKDEQYWVLEDDNDGCVFIHNKKNYNLVLDVDEANTNEGTRIKVTEKHKDPSLPIKAQKFKLQTSNWSTERSFQAINFFKAWLTDVEKRAFMGFQHYPDEQNQVWNDLYWKENGTNNEGQDKFIFLMYKLDDDRVVIVNRQTGEVLEHVYWDEKETSVVLRPYNGKENQVFRKLNIPEWNTFKLLVDNDKRIVGVQDDKVFSRTKITSLDTEKHKDNDYTRLFLNDNGIKDKKISLPSLFPPGELGPIPELTGFNDLLPENEDAKRVVIGSELIPGILVNDSLTLADRIKKNPYYILEYRQYWHLLWSDVFTAGSKKIKTELTGISEGAQEKMKELIGASICTDIGLKFVDKSEPFGKQITSGLTVLHSCNDELGETTTITDVENPNDFTVKYARYARAHEFVLKDSTGKVVGDPWVAVDENDMYLKMFKK

SEQ ID NO: 181 - protein, 658 aa, Bacillus sp.
MNRNKDCNDGIPKAISDMYDRYPYAKDPNAALQNMNYKDWLVMSPGDSQNGLPDKVTTAAIGTAVVGTLLWGFVANPIVGGVASVICAFATLFPILWPDRQEPKKVWAEFMANGEEAFGKKMQEVERSRALSYLAAMKKELEKYEDALEAWKKNKTRETAEAVKREFNDAGDYIDNKLEELKLNGYQHILLSCYAQAAFLHLNLLEQGVKLGDKWDQYSDSLQTSTSSDYWYKLLLKRMEEYIDYCTKTYNEGLVILKNSKWTTYNAYRRDMTLTVLDLIALFPNFDNRKYPMKTKTQLTREIYTNPLITGLYNDELTVDVGEKQLTRNPHLFTWFNGVRCYTRKRGYDVKRDALCGIKNVYKNTNSADNESIDSPLYGNAEGQIKNKVVDPGLDIRKLNIRRYKLSENTNPNGIQEIKCSIHQAGGEFKEGYPLYSVESLDKRFEEKVIQPEQPELDRDKNPAALTHTLSSMFVYEKLKGNGNHGALYTYSFAWTHDSVDRKNTIAKDMITQIPAVKALPESKVEIIKGPGHTGGDIVKFKSHVDSLRMVCTVEEDTLQRIKYKVRIRYAAKDNWNLSLYFSDRGQTYTKQLPKTYSGDDYTKSSSFQYIDLVEERLLYDSSLELFLTSPPDDSGSSKESFLIDKIEFIPLGPVQED

SEQ ID NO: 182 - protein, 652 aa, Artificial sequence
  Variant of native sequence
MNRNKDCNDGIPKAISDMYDRYPYAKDPNAALQNMNYKDWLVMSPGDSQNGLPDKVTTAAIGTAVVGTLLWGFVANPIVGGVASVICAFATLFPILWPDRQEPKKVWAEFMANGEEAFGKKMQEVERSRALSYLAAMKKELEKYEDALEAWKKNKTRETAEAVKREFNDAGDYIDNKLEELKLNGYQHILLSCYAQAAFLHLNLLEQGVKLGDKWDQYSDSLQTSTSSDYWYKLLLKRMEEYIDYCTKTYNEGLVILKNSKWTTYNAYRRDMTLTVLDLIALFPNFDNRKYPMKTKTQLTREIYTNPLITGLYNDELTVDVGEKQLTRNPHLFTWFNGVRCYTRKRGYDVKRDALCGIKNVYKNTNSADNESIDSPLYGNAEGQIKNKVVDPGLDIRKLNIRRYKLSENTNPNGIQEIKCSIHQAGGEFKEGYPLYSVESLDKRFEEKVIQPEQPELDRDKNPAALTHTLSSMFVYEKLKGNGNHGALYTYSFAWTHDSVDRKNTIAKDMITQIPAVKALPESKVEIIKGPGHTGGDIVKFKSHVDSLRMVCTVEEDTLQRIKYKVRIRYAAKDNWNLSLYFSDRGQTYTKQLPKTYSGDDYTKSSSFQYIDLVEERLLYDSSLELFLTSPPDDSGSSKESFLIDKIEFIPL

SEQ ID NO: 183 - protein, 378 aa, Bacillus sp.
LLIYICKILLKKGGLIMKFKSAKLAICTMSAATISTAVIPSTAVFAAETQLNVGQKAVTPDVSSYIDIVQDRMKQRDKESKLSGEAINMQEQIIDGWFLSRFWIFKDQDNNHQTNRFISWFKDNLASPKGYDQIAEQMGLNIEALNDMDTSNVNYTSKIGDTIYNGISELTNNTGTTQKMKTDSFQRDYTKSETTSVTNGLQVGFKVVAKGIVYLAGADLEASVNYNLSTTTSLTNAVSDKFTVPSQEVTLPPGHKAVIKHNLNKMVYSGTHDLKGDLTVSFNDKELVQKFIYPNYREINLSDIRKTMNEIDEVNNVNPVDFYQLVGVKNHVKNGDTVYIDTPAKFTFNGANPYYRAIFTEYDDNGNPIQVKSLGGNL

SEQ ID NO: 184 - protein, 362 aa, Artificial sequence
  Variant of native sequence
MKFKSAKLAICTMSAATISTAVIPSTAVFAAETQLNVGQKAVTPDVSSYIDIVQDRMKQRDKESKLSGEAINMQEQIIDGWFLSRFWIFKDQDNNHQTNRFISWFKDNLASPKGYDQIAEQMGLNIEALNDMDTSNVNYTSKIGDTIYNGISELTNNTGTTQKMKTDSFQRDYTKSETTSVTNGLQVGFKVVAKGIVYLAGADLEASVNYNLSTTTSLTNAVSDKFTVPSQEVTLPPGHKAVIKHNLNKMVYSGTHDLKGDLTVSFNDKELVQKFIYPNYREINLSDIRKTMNEIDEVNNVNPVDFYQLVGVKNHVKNGDTVYIDTPAKFTFNGANPYYRAIFTEYDDNGNPIQVKSLGGNL

SEQ ID NO: 185 - protein, 333 aa, Artificial sequence
  Variant of native sequence
MAETQLNVGQKAVTPDVSSYIDIVQDRMKQRDKESKLSGEAINMQEQIIDGWFLSRFWIFKDQDNNHQTNRFISWFKDNLASPKGYDQIAEQMGLNIEALNDMDTSNVNYTSKIGDTIYNGISELTNNTGTTQKMKTDSFQRDYTKSETTSVTNGLQVGFKVVAKGIVYLAGADLEASVNYNLSTTTSLTNAVSDKFTVPSQEVTLPPGHKAVIKHNLNKMVYSGTHDLKGDLTVSFNDKELVQKFIYPNYREINLSDIRKTMNEIDEVNNVNPVDFYQLVGVKNHVKNGDTVYIDTPAKFTFNGANPYYRAIFTEYDDNGNPIQVKSLGGNL

SEQ ID NO: 186 - protein, 655 aa, Bacillus sp.
MTHNDNNNKFEIKDTDTKPRSPLANAPGPTWQNINNRDVETFGSIEIAGKVVSGVISSVIKSLRQQAQIDKIVAIVVVEVFEVLWPVLEGMWYAMMDAVEIMIQEAITTAVRSKAQAELNGIRNALVLFQQAFDDWEKNSDNPQLQDRVRRQFTATNTLIQFAMSSFAVPGFQVPLLVVYAQAANLHLLFLREAVVLGEKWGMSREEVDDYYNGELGLTELTQSYTNHCTNWYHEGLAQSMKLNPSVTILEQWNLYNDFRREMTIMILDIVALWPTYDVKLYPAGTKTELTRIIYTPLMGVLEDSSSISATRKEYGNIAAINQQDGATTIPPALFIWLEKQIVYPYNNLIYSYQNFQKTTFGKVMNGTIFGSNSEKHLTNPISIPIDAESYDVYKVDTSYSAKMEIKSSPIHKLVYYRSKEQQESIISTNTSKGPIDQVSEIANEGYQDYSHCLAHMAGWVSIAYGTGLTEKPYLVPYNLALGWTYANVDPVNSIAPDAITQIPAVKGDKVIGIPEEEAILGEVTAIQGPGFTGGNLVGLFAGAELHMKVTNPVSNVAGYQMRIRYANNHPTILAVSYQGVETSSGKFDVPVTYSGDFKTKLTYNAFKFKEAIIIPSPLREEIADIVLRNEGDSNLLIDKIELIPMDFWRHEQCN

SEQ ID NO: 187 - protein, 646 aa, Artificial sequence
  Variant of native sequence
MTHNDNNNKFEIKDTDTKPRSPLANAPGPTWQNINNRDVETFGSIEIAGKVVSGVISSVIKSLRQQAQIDKIVAIVVVEVFEVLWPVLEGMWYAMMDAVEIMIQEAITTAVRSKAQAELNGIRNALVLFQQAFDDWEKNSDNPQLQDRVRRQFTATNTLIQFAMSSFAVPGFQVPLLVVYAQAANLHLLFLREAVVLGEKWGMSREEVDDYYNGELGLTELTQSYTNHCTNWYHEGLAQSMKLNPSVTILEQWNLYNDFRREMTIMILDIVALWPTYDVKLYPAGTKTELTRIIYTPLMGVLEDSSSISATRKEYGNIAAINQQDGATTIPPALFIWLEKQIVYPYNNLIYSYQNFQKTTFGKVMNGTIFGSNSEKHLTNPISIPIDAESYDVYKVDTSYSAKMEIKSSPIHKLVYYRSKEQQESIISTNTSKGPIDQVSEIANEGYQDYSHCLAHMAGWVSIAYGTGLTEKPYLVPYNLALGWTYANVDPVNSIAPDAITQIPAVKGDKVIGIPEEEAILGEVTAIQGPGFTGGNLVGLFAGAELHMKVTNPVSNVAGYQMRIRYANNHPTILAVSYQGVETSSGKFDVPVTYSGDFKTKLTYNAFKFKEAIIIPSPLREEIADIVLRNEGDSNLLIDKIELIPM

SEQ ID NO: 188 - protein, 1427 aa, Bacillus sp.
MNLNNNNGLEIMGTGSMAYQARYPLAQAPGSEFQGMDYKDWMNRCANGELEELFADPTAVRNGIVAGLAITSYVLSLAFPVASAAAGILSVLLPIWWPDQAGPPGTTQAQFTWDQWMRAAEEMANQKIDSLVKDLAIESLKSLQSSVRDYRQAICNLQTDPNNEAYKEDVRREFNDADDKAKEVMIRLGNPNNAIPLLADYAQAANLHLLLLRDVVKFGESWGFSALEVQQFYFNNGVGNPGMKQLLATYTDHCVRYYNEGLTKRYESGNWNTFNDYRRNMTLMVMDIVSVWPTYDPILYSVPTKSQLTRTVYTPYIHGTLYGQVPTISSIESHVVVPPSLFRWLRQITFYTKNSPAGVFYTLSGQVQSFQRTLNPNLIEEAKGTLAKQVGTLYVANPESEDDVWSFEMDYSHDDPWWSPYPRMIGLVNLNFHLTKTADQKIIFTPNYSSTKKTFGLPCKTNNVIDCDPCEPCNTLPNASDPCNDKSLYSHRFSYMGTYPASNSNPDSSPEGDNESVCYGWTHVSADANNLIDAEKITQIPAVKANAISEPFPVMRGPGSTGGDLVPITKGTEGGTLMLKVTLPAGSGNYLLRIRYASDVSTNVAVSVCHPGGYVFNAPATTTNISNLTYNAFGYLDTRIFKNDCPLTPSEILIRGVPIGSGTCLIDKIEFIPIEGSVEEYEANQALEKARKAVNALFTNDAKNALQLNVTDYAVDQAANLVECVSEEFHAQEKMILLDQVKFAKRLSQERNLLNYGDFESSDWSGENGWRTSPHVHVTSDNPIFKGRYLHMPGAMSPQFSNNIYLTYAYQKVDESKLKSYTRYLVRGFVGNSKDLELLVERYGKEVHVEMDVPNDIRYSLPMNDCGGFDRCKPASYQERLPHTCTCKDTAVAHTDCECKDKVNRTSVDVYTNMMTDHAVDTNGFHSHQSCGCKNNDTSRNGKHPHKSCGCQDPHVFTYHIDTGCVDQEENLGLFFALKIASENGIANIDNLEIIEAQPLTGEALARVKKREQKWKHEMAQKRLQTEKVVQAAKGAIENLFTNAQQTQLKHETLFPEILNAGKLVQDIPYVHHPFLSGALLTVPGMNFDVFQQLSFLSETARGLYEQRNLVSNGTFGAGIANWNATDGVTVQPEGPTSVLVLSNWSDKAFQNLRLDPDRGYVLRVTARKEGGGKGTVTISDCTAYPETLLFTSCDKNTIDTFVTKTLEIFPDTDRIRIDIGETEGMFKIESVELICIEHMEDHIYDMARVGPAKAEEHPILKDANGSPVVYGQEYYMEPYEFPGYKLGESINVGGINEIALAPSMYMKPMELTFEKNVTTPEDMVFIQHKATGPGSGLHGIHYVSVFDSSTSYLQLMYPSTDANQSMWKPILPSVDMDSKFIDGNYFAFKNENLNVFLAYQNLNERHSYAHVGTMNSKTMWRLIPIQ

SEQ ID NO: 189 - protein, 674 aa, Artificial sequence
  Variant of native sequence
MNLNNNNGLEIMGTGSMAYQARYPLAQAPGSEFQGMDYKDWMNRCANGELEELFADPTAVRNGIVAGLAITSYVLSLAFPVASAAAGILSVLLPIWWPDQAGPPGTTQAQFTWDQWMRAAEEMANQKIDSLVKDLAIESLKSLQSSVRDYRQAICNLQTDPNNEAYKEDVRREFNDADDKAKEVMIRLGNPNNAIPLLADYAQAANLHLLLLRDVVKFGESWGFSALEVQQFYFNNGVGNPGMKQLLATYTDHCVRYYNEGLTKRYESGNWNTFNDYRRNMTLMVMDIVSVWPTYDPILYSVPTKSQLTRTVYTPYIHGTLYGQVPTISSIESHVVVPPSLFRWLRQITFYTKNSPAGVFYTLSGQVQSFQRTLNPNLIEEAKGTLAKQVGTLYVANPESEDDVWSFEMDYSHDDPWWSPYPRMIGLVNLNFHLTKTADQKIIFTPNYSSTKKTFGLPCKTNNVIDCDPCEPCNTLPNASDPCNDKSLYSHRFSYMGTYPASNSNPDSSPEGDNESVCYGWTHVSADANNLIDAEKITQIPAVKANAISEPFPVMRGPGSTGGDLVPITKGTEGGTLMLKVTLPAGSGNYLLRIRYASDVSTNVAVSVCHPGGYVFNAPATTTNISNLTYNAFGYLDTRIFKNDCPLTPSEILIRGVPIGSGTCLIDKIEFIPI

SEQ ID NO: 190 - protein, 225 aa, Bacillus sp.
MNKKDKRFTSLVFLYVLHSGYITNLRRQEGFDLERNESFRDAMFHHEQESLTILPEEPIHTDTKQVCFEEVNTNIPFCCAVNIPHGFAYVPNGTHKIAYNLDCVSVVKETCRKTIQVDGCGPVEVTLNLLKVVGCIPYIVNATVVGECGRNCDCDSNGKHHIQVCCSGSICVDNVLKCSIECLPHYEMNCHNVVVSDFKVKPLQDHSCHMLQFTGTIEFTHIPHA

SEQ ID NO: 191 - protein, 367 aa, Bacillus sp.
MTNGNKNNEDSLQNEIKSIVNFPDFDIYKIRTTYNRYVDVSGDPNNNLAPIVQHDGHNGNNQKFLIYTLDNGYSVIAARHSGKVVDVRYVNSPIPGVRLDHLIQHDFKNGDNQKFRLATEGTIEIKHDGQVWDVAGSGNNAPIIPFHYHGGSNQKFRLEKSGSVSIKTPSIVNLPPAPDFKTNDLNEQLPKETTPVVTHVTYLPYFMVKDRYYNALQKIQNSPYYVLVRRQYWDKITQRILAPSETYSYKETTGVSRTDQTSMTETTEISIGADLGFMFKGFSLGLSTSITKSLSVTKSTSNTESTEITKDVSYTNPFTYQIAYAKYMLINEYYVTRANGEMITTGDAAYWRVPDPEQTVSRIIPRK

SEQ ID NO: 192 - protein, 665 aa, Bacillus sp.
MRKLNNDENVVTDTTDVENSIVNDSNDTSSVDISDVCNNERSIAPDSIEGYCFYNKEPNKSENVANCTGYNLPDASSPQAVPVIFAPIVLTPALIEVGKWFGLKIGKWALGQALKELKNFLFPSSDYQAALDQLRRELEAKFETRLSNDKLAQLQAAYRGFENYARLFIQATQDLEAAKENWLHDQNSATEEAMNRARELVFVRFESLHGQLVVWMPQFEIPNYEEIALPLLAQMVNLHLTHLKDGILKGADWGFTAEKIRTYTREFIDLIREYTNRAHNAFNRGFTRIQRNSGIGMALNYRAAMNVYLFDFVYNWSLLRYEGIVPTVSRNLYHYIGNNANPTTHMDGLMKIIVGVPNERARLFHLAVYFRPTNVPWPIASTETQFPERGNMGWVGNRSAANNTPVHYFNTNQDSFENRVHGKVLYPSASRWDLSIQNNRMLANDYLSNDYRFDIKYDDHFIRTVSSHPGHMENNPFYSLADRTEFQQKRNTPSNIIVGFAPNNTKKFYANRLHILSTTTSTTIPVIHYNRLTSTQTAFFDSELGNGGDGSLILANNADAAYYKLNLEQPINQRFRILVRIQAGSPALELRLGNEGQSDSGPTLHLDLLSGHAVSGYYDYITPSFLVDGRLKQELKVTNRGGNSSGLQYNQLIFVPANDFKQLIQ

SEQ ID NO: 193 - protein, 304 aa, Bacillus sp.
MERGLRFMAIVDLDAYLLALAKKVYSPFAPFLNRVDTSSLKVKNAESYGFEIKNNKPQGTMFMGEAALKNDTNETQTIKSDSFTKTITDSITLSVTNGIKTGIDISVGGKVFGMGVETSMSFEVSTSTTREQTSTEGVAYTVPSQDVVVPAKKTYYVYCALQRSQLEGSIRLRADLSDRFMVMMKVQDLEAPIYNGDIYDFVKQHQSLHPLPSGISLNHNDKSIHFEGVAEYIYGTGTKFNVTITDTPSSQGTQEHKPFDAKTGLGTYELQLDGKKLGFDLNDLKDQMEPGVFEKLKELQNEIV

SEQ ID NO: 194 - protein, 297 aa, Artificial sequence
  Variant of native sequence
MAIVDLDAYLLALAKKVYSPFAPFLNRVDTSSLKVKNAESYGFEIKNNKPQGTMFMGEAALKNDTNETQTIKSDSFTKTITDSITLSVTNGIKTGIDISVGGKVFGMGVETSMSFEVSTSTTREQTSTEGVAYTVPSQDVVVPAKKTYYVYCALQRSQLEGSIRLRADLSDRFMVMMKVQDLEAPIYNGDIYDFVKQHQSLHPLPSGISLNHNDKSIHFEGVAEYIYGTGTKFNVTITDTPSSQGTQEHKPFDAKTGLGTYELQLDGKKLGFDLNDLKDQMEPGVFEKLKELQNEIV

SEQ ID NO: 195 - protein, 394 aa, Bacillus sp.
LWYIVLQLQMEKGYSCMLKKNKIVFVGMTALTIVGSGLTASIPTAFANTQENIAPVQSIQGQEFTDENGQVISPGTFANISPYWLIGDSNNELYNFYNQVKQRIFDKQNKEQNMLKLDEYLNDLWFVGAVSQLYETPNEHNKRLEASNLVRWYKNNNAAKPHFEILESKLDNVEPILDITEPIGYFATESEYTNNSPHQGEYLIPGWSNTTSTTYNTTTTKGFSIGANSGIEIPLPFVDKLGLTGSYNFSKTENVTTTDSTTLTIPVQMIQVSPFSHSKTSFYFQTHQYRAKFDVTAKFKAEVGRDAEYTRKRSAFYLLARYNDYLPKGIVVENGGKLTLEGKGEISVPNHINGFKLVKETKETPLSDGEGKIIKESYTKHPNTNKFTPKIEKP

SEQ ID NO: 196 - protein, 348 aa, Artificial sequence
  Variant of native sequence
MNTQENIAPVQSIQGQEFTDENGQVISPGTFANISPYWLIGDSNNELYNFYNQVKQRIFDKQNKEQNMLKLDEYLNDLWFVGAVSQLYETPNEHNKRLEASNLVRWYKNNNAAKPHFEILESKLDNVEPILDITEPIGYFATESEYTNNSPHQGEYLIPGWSNTTSTTYNTTTTKGFSIGANSGIEIPLPFVDKLGLTGSYNFSKTENVTTTDSTTLTIPVQMIQVSPFSHSKTSFYFQTHQYRAKFDVTAKFKAEVGRDAEYTRKRSAFYLLARYNDYLPKGIVVENGGKLTLEGKGEISVPNHINGFKLVKETKETPLSDGEGKIIKESYTKHPNTNKFTPKIEKP

SEQ ID NO: 197 - protein, 314 aa, Bacillus sp.
MKTLFKIKKTFITKLGIILGISSTMFFGNNVMAAQAANIIDVDAQMDKISDFYFKSELKWKDVADFPGAYHYIRLDSKKTNMDLDLKTSNLKNLTYSDLNPEYIGENEFDNTNGVTEQTFTTAWYSHQVTNSASTSVTEGFKIGGKTTLFKLPILLTGGIDITAEFNSATSKTNTVTDTKTLTASPQNIKVPAGKKYLVKVNMAKKTFNGDIDFRANGQNVKSTLNTLATYYGPGFPRPDKCSSLTFTTADIWEKLSANSQNQIKGVNFDSNKNLILNGKAHINGIFGSTLSVSIYDITASKKSPKLIQQKNMG

SEQ ID NO: 198 - protein, 279 aa, Artificial sequence
  Variant of native sequence
MANIIDVDAQMDKISDFYFKSELKWKDVADFPGAYHYIRLDSKKTNMDLDLKTSNLKNLTYSDLNPEYIGENEFDNTNGVTEQTFTTAWYSHQVTNSASTSVTEGFKIGGKTTLFKLPILLTGGIDITAEFNSATSKTNTVTDTKTLTASPQNIKVPAGKKYLVKVNMAKKTFNGDIDFRANGQNVKSTLNTLATYYGPGFPRPDKCSSLTFTTADIWEKLSANSQNQIKGVNFDSNKNLILNGKAHINGIFGSTLSVSIYDITASKKSPKLIQQKNMG

SEQ ID NO: 199 - protein, 972 aa, Bacillus sp.
MQKKMNNNLKHLQTRDLLENSITNFDVYNAIIEQNYMHILKDVVEQNYTSATYPVLKNISTGTIGLTGTIVGMIATGGVASIAKIGFSLLSTTFNIFLDVNKPSESATAVWEKIKKYAEEYVGKEFDVNQFNRLMSELDGCKDSVALYLDYRKKADPAALYYCRSAIALFTQRISTFQQKGYEILSLPLFVQVARLLLLLYRDLVLYGESWNISPTDRAKDKKMMKKLIKQFSEYSFITYLSGLEDMQQDETKIWKSPCCDINQDRKLQEKVFPFTKHWNAINQYKQGMQLSVFDIVAQFPTLDPGTYPLIGTNIKQSREVFSRITGAIIKKEHLVEPSQTNVSTTEQIDNLLPAGYEGELIDLRTKVGKLTPPIGYGNIKYPLYSMDQVIDKVTGAAMGKSYKVGPFKPNEETWFPSNHLVPLDMAGSCCDTEHGLVNNFYAGSSMVAFPPEKIKCKINPDKHKLSSVTLLGTFKTWHQVDWPSESYGFISSGLICGFRQNDLNPKHILSSSLITQIPAEMNANNGRKGFRNVSENITGQNVMRAQINGSYLEYDVFGIENATTHCEIRLYLSYGGNRNSSIDIAVSHLEPNSLGCEWHMGKEQKIGNIPLDISALVENSIRGMNGYYSLTKKVPIILKEGRSKIKLAFKSNNDLNTVMIDRIEIIPVKTETNISGKNGTVIFTVHQNGKLEAEAVGTDISIDGVDSKKSWKVFVCGQDKFDNKGEMKELIFYGQEKPKDIASTFNKMFPESTSEWIIPGNTLSVLDFSEPPIPQETIPLGKYNNQKKILELVKVNDKKNEQFLMRKTATASEADLENEVGKDYSVFAGGKLVYRCKKGTKFKTVMNAFNALNIRAYSARIVEENEKMNPKDTAKDMIDDLFPRTHNNKPDYANCVKPHIVSYDTRVAKNALRTMHKNNIPIPDDFYTNLRAAEEKIFVRENSQACLTDKNNLTTMLGLRGKDGKCVQGKN

SEQ ID NO: 200 - protein, 669 aa, Artificial sequence
  Variant of native sequence
MQKKMNNNLKHLQTRDLLENSITNFDVYNAIIEQNYMHILKDVVEQNYTSATYPVLKNISTGTIGLTGTIVGMIATGGVASIAKIGFSLLSTTFNIFLDVNKPSESATAVWEKIKKYAEEYVGKEFDVNQFNRLMSELDGCKDSVALYLDYRKKADPAALYYCRSAIALFTQRISTFQQKGYEILSLPLFVQVARLLLLLYRDLVLYGESWNISPTDRAKDKKMMKKLIKQFSEYSFITYLSGLEDMQQDETKIWKSPCCDINQDRKLQEKVFPFTKHWNAINQYKQGMQLSVFDIVAQFPTLDPGTYPLIGTNIKQSREVFSRITGAIIKKEHLVEPSQTNVSTTEQIDNLLPAGYEGELIDLRTKVGKLTPPIGYGNIKYPLYSMDQVIDKVTGAAMGKSYKVGPFKPNEETWFPSNHLVPLDMAGSCCDTEHGLVNNFYAGSSMVAFPPEKIKCKINPDKHKLSSVTLLGTFKTWHQVDWPSESYGFISSGLICGFRQNDLNPKHILSSSLITQIPAEMNANNGRKGFRNVSENITGQNVMRAQINGSYLEYDVFGIENATTHCEIRLYLSYGGNRNSSIDIAVSHLEPNSLGCEWHMGKEQKIGNIPLDISALVENSIRGMNGYYSLTKKVPIILKEGRSKIKLAFKSNNDLNTVMIDRIEIIPV

SEQ ID NO: 201 - protein, 395 aa, Bacillus sp.
LWYTVLQFQLEKERISMLQNKKKSLFTGMTALTIMGSGLTVSIPTAFANTQENIGQVQSIQGPEFTDENGQVISPSTFASISPYWLIGDSNNELYNFYNQVKQRIVDRQNKEQNMLKLDEYLNDLWFVGAVSQLYETPNDHNKRLEASNLVRWYKNNNAAKPHFEILESKLDNVEPILDITEPIGYFATESEYTNDSPQQGEYLIPGWSNTTSTTYNTTTTKGFSIGANSGIEIPLPFVDKLGLTGSYNFSKTENVTTTDSTTLTIPVQMIQVSSFAHSKTSFYFQTHQYRAKFDVTAKFKAEVGRDAEYTRKSSAFYLLAKYNEYLPKGIVVENGGKLTLEGKGEISVPNHINGFKLVKETKETPLTGGKEKTLKESYTKDSNTDDLIPEVQKP

SEQ ID NO: 202 - protein, 379 aa, Artificial sequence
  Variant of native sequence
MLQNKKKSLFTGMTALTIMGSGLTVSIPTAFANTQENIGQVQSIQGPEFTDENGQVISPSTFASISPYWLIGDSNNELYNFYNQVKQRIVDRQNKEQNMLKLDEYLNDLWFVGAVSQLYETPNDHNKRLEASNLVRWYKNNNAAKPHFEILESKLDNVEPILDITEPIGYFATESEYTNDSPQQGEYLIPGWSNTTSTTYNTTTTKGFSIGANSGIEIPLPFVDKLGLTGSYNFSKTENVTTTDSTTLTIPVQMIQVSSFAHSKTSFYFQTHQYRAKFDVTAKFKAEVGRDAEYTRKSSAFYLLAKYNEYLPKGIVVENGGKLTLEGKGEISVPNHINGFKLVKETKETPLTGGKEKTLKESYTKDSNTDDLIPEVQKP

SEQ ID NO: 203 - protein, 1254 aa, Bacillus sp.
LMNRNYNNNYEIMNNDGRCYQPRYPLANAPGELSTDISVQDGLVIATGITTAILSVSFPVAAAVAGVTALLIPYLWPAEAGPPGSTQAQFTWDKLMNAAEELIDQKISDLVRTNAINTLRILQSRIRDYQQAICNLKTEPDNEAYKADVRREFNDAEDQAKSAIIELKTTGYEIPLLSSYAQAANFHLILLRDVVQYGDNWGFSPLEVQQYYSNTSAVGNPGMLQLLAIYTDYCVEWYNAGVSKLIQQAGYTIEGWNKTNDFRRDMTIMVLDSVSLWPTYDPNFYAYPTKSQLTRSVYTPMSGQLPRPFHELDTVIAPPSLFSRLREITFFRRNFPVPTNQDAIFTQYAGYKMLLQNTLSNTLQETPVIGGVGHETSVVRIGEEPNFEVYKMQNIILGPEASRQFQSPQTFDFYFTPSGRTETVGINYAEIQGEPTNTTNQGLACNNKTEPCDPCTSTTPCPTGPINSTIPCDNLNLYSHRLSWVGGFLSAVPPSIIGLTYGWTHVSADTNNLIDVEKITQIPAVKASETEGTVIKGPGSTGGDLVQLSNPNLMYLKVTIPANMNSNIAGYRIRIRYSSNLPTRIGVVFESVFGSANAAYDLPVTYSGGNLTYNTFGYQDTISIRTPTTGVQEGHLLIQNVGSGGPVIIDKIEFIPIEGSLEEYEANQALEKARKAVNALFTNDAKNALKLNITDYDVDQAANVVECVSGEICSQEKMILLDQVKFVKRLSQTRNLLNDGDFESSDWSGMNGWKTSPHVYVTEGNPIFKGRYLNMPGARSSQFTGNVDPTYAYQKVDESKLKPYTRYLVRGFVGSSNQLELFVTRYEKEVHDKMNIRLNPMNTWNQPVRLQDSCGKGQVSGYPMSSDQCQANAYPTNRSDMTMPSIKGVCEEKRNFVFHIDVGEIDQRANLGIGVGFRISSPDGMAQLSNLELVEAKPLTGEALARVKKREQKWKRELEQKCAQTEKFVTAAQQAVNSLFTDARKDRLKATTTMQNIVNAEEKMKVIPYVYDSDFEDLPGMTFDIFTQLESQVMNAFGLYGYRNTIQNGDFSSGLATWHATTTGADVQERDGRSHVLVISNWSANVSQDVCVQPQRGYVLRVTARKKGTGKGYVTISDCTEENIETVTFTANEDVTIPRPPVRPRQSVTPPVCDKPRYAESFGIVPDDTNMMNRSQASYGTESCSCGCGKTIRNGAESCQTNPCPSTPSPNGSLSDYITKTIEIFPETNRVRIEIGETEGSFMVKSVELICMEE

SEQ ID NO: 204 - protein, 1253 aa, Artificial sequence
  Variant of native sequence
MNRNYNNNYEIMNNDGRCYQPRYPLANAPGELSTDISVQDGLVIATGITTAILSVSFPVAAAVAGVTALLIPYLWPAEAGPPGSTQAQFTWDKLMNAAEELIDQKISDLVRTNAINTLRILQSRIRDYQQAICNLKTEPDNEAYKADVRREFNDAEDQAKSAIIELKTTGYEIPLLSSYAQAANFHLILLRDVVQYGDNWGFSPLEVQQYYSNTSAVGNPGMLQLLAIYTDYCVEWYNAGVSKLIQQAGYTIEGWNKTNDFRRDMTIMVLDSVSLWPTYDPNFYAYPTKSQLTRSVYTPMSGQLPRPFHELDTVIAPPSLFSRLREITFFRRNFPVPTNQDAIFTQYAGYKMLLQNTLSNTLQETPVIGGVGHETSVVRIGEEPNFEVYKMQNIILGPEASRQFQSPQTFDFYFTPSGRTETVGINYAEIQGEPTNTTNQGLACNNKTEPCDPCTSTTPCPTGPINSTIPCDNLNLYSHRLSWVGGFLSAVPPSIIGLTYGWTHVSADTNNLIDVEKITQIPAVKASETEGTVIKGPGSTGGDLVQLSNPNLMYLKVTIPANMNSNIAGYRIRIRYSSNLPTRIGVVFESVFGSANAAYDLPVTYSGGNLTYNTFGYQDTISIRTPTTGVQEGHLLIQNVGSGGPVIIDKIEFIPIEGSLEEYEANQALEKARKAVNALFTNDAKNALKLNITDYDVDQAANVVECVSGEICSQEKMILLDQVKFVKRLSQTRNLLNDGDFESSDWSGMNGWKTSPHVYVTEGNPIFKGRYLNMPGARSSQFTGNVDPTYAYQKVDESKLKPYTRYLVRGFVGSSNQLELFVTRYEKEVHDKMNIRLNPMNTWNQPVRLQDSCGKGQVSGYPMSSDQCQANAYPTNRSDMTMPSIKGVCEEKRNFVFHIDVGEIDQRANLGIGVGFRISSPDGMAQLSNLELVEAKPLTGEALARVKKREQKWKRELEQKCAQTEKFVTAAQQAVNSLFTDARKDRLKATTTMQNIVNAEEKMKVIPYVYDSDFEDLPGMTFDIFTQLESQVMNAFGLYGYRNTIQNGDFSSGLATWHATTTGADVQERDGRSHVLVISNWSANVSQDVCVQPQRGYVLRVTARKKGTGKGYVTISDCTEENIETVTFTANEDVTIPRPPVRPRQSVTPPVCDKPRYAESFGIVPDDTNMMNRSQASYGTESCSCGCGKTIRNGAESCQTNPCPSTPSPNGSLSDYITKTIEIFPETNRVRIEIGETEGSFMVKSVELICMEE

SEQ ID NO: 205 - protein, 656 aa, Artificial sequence
  Variant of native sequence
MNRNYNNNYEIMNNDGRCYQPRYPLANAPGELSTDISVQDGLVIATGITTAILSVSFPVAAAVAGVTALLIPYLWPAEAGPPGSTQAQFTWDKLMNAAEELIDQKISDLVRTNAINTLRILQSRIRDYQQAICNLKTEPDNEAYKADVRREFNDAEDQAKSAIIELKTTGYEIPLLSSYAQAANFHLILLRDVVQYGDNWGFSPLEVQQYYSNTSAVGNPGMLQLLAIYTDYCVEWYNAGVSKLIQQAGYTIEGWNKTNDFRRDMTIMVLDSVSLWPTYDPNFYAYPTKSQLTRSVYTPMSGQLPRPFHELDTVIAPPSLFSRLREITFFRRNFPVPTNQDAIFTQYAGYKMLLQNTLSNTLQETPVIGGVGHETSVVRIGEEPNFEVYKMQNIILGPEASRQFQSPQTFDFYFTPSGRTETVGINYAEIQGEPTNTTNQGLACNNKTEPCDPCTSTTPCPTGPINSTIPCDNLNLYSHRLSWVGGFLSAVPPSIIGLTYGWTHVSADTNNLIDVEKITQIPAVKASETEGTVIKGPGSTGGDLVQLSNPNLMYLKVTIPANMNSNIAGYRIRIRYSSNLPTRIGVVFESVFGSANAAYDLPVTYSGGNLTYNTFGYQDTISIRTPTTGVQEGHLLIQNVGSGGPVIIDKIEFIPI

SEQ ID NO: 206 - protein, 657 aa, Artificial sequence
  Variant of native sequence
LMNRNYNNNYEIMNNDGRCYQPRYPLANAPGELSTDISVQDGLVIATGITTAILSVSFPVAAAVAGVTALLIPYLWPAEAGPPGSTQAQFTWDKLMNAAEELIDQKISDLVRTNAINTLRILQSRIRDYQQAICNLKTEPDNEAYKADVRREFNDAEDQAKSAIIELKTTGYEIPLLSSYAQAANFHLILLRDVVQYGDNWGFSPLEVQQYYSNTSAVGNPGMLQLLAIYTDYCVEWYNAGVSKLIQQAGYTIEGWNKTNDFRRDMTIMVLDSVSLWPTYDPNFYAYPTKSQLTRSVYTPMSGQLPRPFHELDTVIAPPSLFSRLREITFFRRNFPVPTNQDAIFTQYAGYKMLLQNTLSNTLQETPVIGGVGHETSVVRIGEEPNFEVYKMQNIILGPEASRQFQSPQTFDFYFTPSGRTETVGINYAEIQGEPTNTTNQGLACNNKTEPCDPCTSTTPCPTGPINSTIPCDNLNLYSHRLSWVGGFLSAVPPSIIGLTYGWTHVSADTNNLIDVEKITQIPAVKASETEGTVIKGPGSTGGDLVQLSNPNLMYLKVTIPANMNSNIAGYRIRIRYSSNLPTRIGVVFESVFGSANAAYDLPVTYSGGNLTYNTFGYQDTISIRTPTTGVQEGHLLIQNVGSGGPVIIDKIEFIPI

SEQ ID NO: 207 - protein, 325 aa, Bacillus sp.
VVLPIKNYYIHSKGVVRMKKKTTAMKSILVMSTIVSLGTGLAVASPSVASANEIQRSTLNETSYIKSESAIQNVNTTIDDMLRTIPIPGIPELGQKPWSRTTSIYGNSMDVSGVNINETNVTKVLPVFLGSNTFVNNTSQEQTYNTSTFSQAITNTTTTTTTHGFKESTAGKVKVGIPFIGETEITQTLEYNFTNSNANTKSETNTITAPAQPVKVPANKIYKTEVYFEKKQTSGNVELYADILTGAKNPKSSEIISIGSALDRANNKNGLTKSPTDPNRVRSKGNGTFTIEYGTNLVVKTYDITSGTRTTDSTTLVNTKVIPLH

SEQ ID NO: 208 - protein, 308 aa, Artificial sequence
  Variant of native sequence
MKKKTTAMKSILVMSTIVSLGTGLAVASPSVASANEIQRSTLNETSYIKSESAIQNVNTTIDDMLRTIPIPGIPELGQKPWSRTTSIYGNSMDVSGVNINETNVTKVLPVFLGSNTFVNNTSQEQTYNTSTFSQAITNTTTTTTTHGFKESTAGKVKVGIPFIGETEITQTLEYNFTNSNANTKSETNTITAPAQPVKVPANKIYKTEVYFEKKQTSGNVELYADILTGAKNPKSSEIISIGSALDRANNKNGLTKSPTDPNRVRSKGNGTFTIEYGTNLVVKTYDITSGTRTTDSTTLVNTKVIPLH

SEQ ID NO: 209 - protein, 275 aa, Artificial sequence
  Variant of native sequence
MNEIQRSTLNETSYIKSESAIQNVNTTIDDMLRTIPIPGIPELGQKPWSRTTSIYGNSMDVSGVNINETNVTKVLPVFLGSNTFVNNTSQEQTYNTSTFSQAITNTTTTTTTHGFKESTAGKVKVGIPFIGETEITQTLEYNFTNSNANTKSETNTITAPAQPVKVPANKIYKTEVYFEKKQTSGNVELYADILTGAKNPKSSEIISIGSALDRANNKNGLTKSPTDPNRVRSKGNGTFTIEYGTNLVVKTYDITSGTRTTDSTTLVNTKVIPLH

SEQ ID NO: 210 - protein, 302 aa, Bacillus sp.
MMKKMIASLMLIGTVTLYLGTAKEVNAAQTITNIDTNLNQIGEYYYQNNLAGTTMDRMYQLDKKPQSISSRANLDFDPNSNNLKLKQSVPNLIYVGDNEFDNTTDTDQSYVTTNYSKAVTQTVSTTTTKGFNINGQGLEFTLPLFIGNNKITAAFNSGTTKTTTETTTETITSGAQPVKVPAHKKYRVITSLEEVSFNGTFDYKANGTNLYNDITAKGLWIDRYGTPYRKTYNFHESVGSEWNSLNSSQKASIKEIEINPSNNSMTVNGSAEVTGTLGTKMIVKTYDITDGGNNLIRTQVIE

SEQ ID NO: 211 - protein, 276 aa, Artificial sequence
  Variant of native sequence
MAQTITNIDTNLNQIGEYYYQNNLAGTTMDRMYQLDKKPQSISSRANLDFDPNSNNLKLKQSVPNLIYVGDNEFDNTTDTDQSYVTTNYSKAVTQTVSTTTTKGFNINGQGLEFTLPLFIGNNKITAAFNSGTTKTTTETTTETITSGAQPVKVPAHKKYRVITSLEEVSFNGTFDYKANGTNLYNDITAKGLWIDRYGTPYRKTYNFHESVGSEWNSLNSSQKASIKEIEINPSNNSMTVNGSAEVTGTLGTKMIVKTYDITDGGNNLIRTQVIE

SEQ ID NO: 212 - protein, 298 aa, Bacillus sp.
MKKLMFSLVATTMSIGLIFGSAPAKADANNKNSAYQDIDERIKKMAQSAVLWGPIREYRSHNIKDIELKGNLIDGSIVENSQVLTVSSDILENNLGHTVNMPSTGYEHQFEETTSTTNTSGWKFGYNYNASFSVLMVSASQSFSVEYNMSTSDTHEKKEKRSFTVPSIEVPVPAGKKYKVDYVFEKVKVSGKNKIDANLYGDVTYYYNNQPMSPELLYSVQGLAADKQGFEKVIRDSAVGNDRFGIKTTGIGQFSTEFGTRLTRTLTDITDSRNPVKLETKNVPVEFKTLSTDTRVIK

SEQ ID NO: 213 - protein, 273 aa, Artificial sequence
  Variant of native sequence
MDANNKNSAYQDIDERIKKMAQSAVLWGPIREYRSHNIKDIELKGNLIDGSIVENSQVLTVSSDILENNLGHTVNMPSTGYEHQFEETTSTTNTSGWKFGYNYNASFSVLMVSASQSFSVEYNMSTSDTHEKKEKRSFTVPSIEVPVPAGKKYKVDYVFEKVKVSGKNKIDANLYGDVTYYYNNQPMSPELLYSVQGLAADKQGFEKVIRDSAVGNDRFGIKTTGIGQFSTEFGTRLTRTLTDITDSRNPVKLETKNVPVEFKTLSTDTRVIK

SEQ ID NO: 214 - protein, 808 aa, Unknown
  unknown organism from environmental sample
MTKRRTKILSMTLATGVFAGTYIPTAYTAFAETEPKEDLNENQTKNINQNNLSIDLKGWFENPYKGVTFDQFINAFNNNAWNPLLVDLKNNGNAGSGTLVFLKGMMGTGLSLLPPPASLLGSVWNIFMPSTNGGTDMWQQLETYIEEKIDRKINDYHKYLMGAEFNGAMSAIKEYQRVLQIYNDSKNSLKRVEDPGTPVIEAVRAADRKLKEFIAIIQTPEKETDSVYQQITAPIFVQAANAHLLLQRDMILYGEEWGMDKNQWQGYKDNQKQLIQEYTNYAMKVYNDGLEKKKKEAENINTQQPNRNTDRWNHINAYVREYTLSVLDFVDLFPATNPETYSKGVMQENSRQIYSSIKGAVIPQGGTGEGITWENIQKTLDSQVYKGDLHKLDIRSFDRIDAIQPWYSDKQNGGSNWTTPGWTGNTTGGTLKTLINPSDNPITRVKAQSSRTPNYIDFKFDTGGDNPSFGRYVSGHVSYKEDVFEYPNQKLSQIHAFNRSTYPGFEGIDAVVFGFVDKNLKQSSTYLMTNMITAIPVAKYNRGMSNFQPQVESIHAKQKAMKTDTTNSYLAYGVEVSKEQEYKIRYKVAANENSKISLSHRKPGGNYAKIADTTIPITRNFADTVKGEYGSYKIVEGPTVKLTKGTHDLKLENSQGKFSIDQIELEPVEQDQVIAQDNFDDKRLSWVNLGGIVNGGVTGKAGTIDTNGNTWTYIQDQVFPFSKYTLSIKVKLNSNNGNERQKVTLYTDNLKHERITKTVELKGNAGYQEIQLEFITRRDSANTHVGILTSNGTSNILFDDVKVIGAKK

SEQ ID NO: 215 - protein, 778 aa, Artificial sequence
  Variant of native sequence
METEPKEDLNENQTKNINQNNLSIDLKGWFENPYKGVTFDQFINAFNNNAWNPLLVDLKNNGNAGSGTLVFLKGMMGTGLSLLPPPASLLGSVWNIFMPSTNGGTDMWQQLETYIEEKIDRKINDYHKYLMGAEFNGAMSAIKEYQRVLQIYNDSKNSLKRVEDPGTPVIEAVRAADRKLKEFIAIIQTPEKETDSVYQQITAPIFVQAANAHLLLQRDMILYGEEWGMDKNQWQGYKDNQKQLIQEYTNYAMKVYNDGLEKKKKEAENINTQQPNRNTDRWNHINAYVREYTLSVLDFVDLFPATNPETYSKGVMQENSRQIYSSIKGAVIPQGGTGEGITWENIQKTLDSQVYKGDLHKLDIRSFDRIDAIQPWYSDKQNGGSNWTTPGWTGNTTGGTLKTLINPSDNPITRVKAQSSRTPNYIDFKFDTGGDNPSFGRYVSGHVSYKEDVFEYPNQKLSQIHAFNRSTYPGFEGIDAVVFGFVDKNLKQSSTYLMTNMITAIPVAKYNRGMSNFQPQVESIHAKQKAMKTDTTNSYLAYGVEVSKEQEYKIRYKVAANENSKISLSHRKPGGNYAKIADTTIPITRNFADTVKGEYGSYKIVEGPTVKLTKGTHDLKLENSQGKFSIDQIELEPVEQDQVIAQDNFDDKRLSWVNLGGIVNGGVTGKAGTIDTNGNTWTYIQDQVFPFSKYTLSIKVKLNSNNGNERQKVTLYTDNLKHERITKTVELKGNAGYQEIQLEFITRRDSANTHVGILTSNGTSNILFDDVKVIGAKK

SEQ ID NO: 216 - protein, 668 aa, Artificial sequence
  Variant of native sequence
MTKRRTKILSMTLATGVFAGTYIPTAYTAFAETEPKEDLNENQTKNINQNNLSIDLKGWFENPYKGVTFDQFINAFNNNAWNPLLVDLKNNGNAGSGTLVFLKGMMGTGLSLLPPPASLLGSVWNIFMPSTNGGTDMWQQLETYIEEKIDRKINDYHKYLMGAEFNGAMSAIKEYQRVLQIYNDSKNSLKRVEDPGTPVIEAVRAADRKLKEFIAIIQTPEKETDSVYQQITAPIFVQAANAHLLLQRDMILYGEEWGMDKNQWQGYKDNQKQLIQEYTNYAMKVYNDGLEKKKKEAENINTQQPNRNTDRWNHINAYVREYTLSVLDFVDLFPATNPETYSKGVMQENSRQIYSSIKGAVIPQGGTGEGITWENIQKTLDSQVYKGDLHKLDIRSFDRIDAIQPWYSDKQNGGSNWTTPGWTGNTTGGTLKTLINPSDNPITRVKAQSSRTPNYIDFKFDTGGDNPSFGRYVSGHVSYKEDVFEYPNQKLSQIHAFNRSTYPGFEGIDAVVFGFVDKNLKQSSTYLMTNMITAIPVAKYNRGMSNFQPQVESIHAKQKAMKTDTTNSYLAYGVEVSKEQEYKIRYKVAANENSKISLSHRKPGGNYAKIADTTIPITRNFADTVKGEYGSYKIVEGPTVKLTKGTHDLKLENSQGKFSIDQIELEPV

SEQ ID NO: 217 - protein, 638 aa, Artificial sequence
  Variant of native sequence
METEPKEDLNENQTKNINQNNLSIDLKGWFENPYKGVTFDQFINAFNNNAWNPLLVDLKNNGNAGSGTLVFLKGMMGTGLSLLPPPASLLGSVWNIFMPSTNGGTDMWQQLETYIEEKIDRKINDYHKYLMGAEFNGAMSAIKEYQRVLQIYNDSKNSLKRVEDPGTPVIEAVRAADRKLKEFIAIIQTPEKETDSVYQQITAPIFVQAANAHLLLQRDMILYGEEWGMDKNQWQGYKDNQKQLIQEYTNYAMKVYNDGLEKKKKEAENINTQQPNRNTDRWNHINAYVREYTLSVLDFVDLFPATNPETYSKGVMQENSRQIYSSIKGAVIPQGGTGEGITWENIQKTLDSQVYKGDLHKLDIRSFDRIDAIQPWYSDKQNGGSNWTTPGWTGNTTGGTLKTLINPSDNPITRVKAQSSRTPNYIDFKFDTGGDNPSFGRYVSGHVSYKEDVFEYPNQKLSQIHAFNRSTYPGFEGIDAVVFGFVDKNLKQSSTYLMTNMITAIPVAKYNRGMSNFQPQVESIHAKQKAMKTDTTNSYLAYGVEVSKEQEYKIRYKVAANENSKISLSHRKPGGNYAKIADTTIPITRNFADTVKGEYGSYKIVEGPTVKLTKGTHDLKLENSQGKFSIDQIELEPV

SEQ ID NO: 218 - protein, 592 aa, Unknown
  unknown organism from environmental sample
MKIENDKIDQITQNEVVDNYNLEELYKLNRGITSIIGWVAKSIGKWLLKEGLFALKDIALGKKGDPMIQIMESVEQLINQRLAQAKKDELEAEYIGFINTIDRLHDAINSLKKYENDKTSKGLEELVKAKDVIKMQISVLDGLFTQRLPQFEIKGYEGISLPLFVPVTTLHLTLLKDVVLNGKEWGFDKESIEYYQNSFHKLVPEYTKRAINLYDMERKRRNTEGKFIFKNAMKETLNLIYLWSLYQYEGINPTFSQSYWYTVGTVPGNNNSWENIYRLANGPTNAFIRAIQYHITNKALTGNDDYLHGLITYYQYHSKYRQGTGILGSHGGRLFLGDVPSWKNRAWVSDFNRTRKWYLDIGGRTVINIDSSSIPHLTGVTYEDYFIRSLSYIPYNITNLRSQFSISDILSYQDAHNNPVRGNIIVGFAPINTKTFFEKGEHHISEGKSYTFPALQLYDIQSANNAFLKEYLEQGTDGGLEIKGNKKDETCIHYRMNLENISKNQEYKTLLRFGGIGTIRMFIEHDGNERIQVGEIRTKNLYGWEDYFIDGPLPKHFKNKKVVSLIIDVGTSDVKFSQAILIPKNKFNILIP

SEQ ID NO: 219 - protein, 808 aa, Unknown
  unknown organism from environmental sample
MTNKHKKIISMTLATGVFAGTYIPTAYTAFAETEPKEDLNEKQTKNINQNNPSIDLKGWFENPYKGVTFDQFINAFNNNAWNPLLVDLKNSGNAGSGTLVFLKGMMGTGLSLLPPPASLLGSVWNIFMPSTNGGTDMWKQLETYIEEKIDSKINDYHKYLMGAEFNGAMQYIKEYQRVLQIYNDSKNSLKRVEAPGTAVITAARNADTALKAFIAIIQTPEKETDSVYQQITAPIFVQAANAHLLLQRDMILYGKEWGMDTNQWQGYKDNQKKLIQEYTNYAMKVYNDGLEKKKKEAENINTQQPNRNTDRWNHINNYVREYTLSVLDFVDLFPATNPETYSKGLMQENSRQIYSSIKGAVIPQGGTGEGTTWENIQKILDSQAYTGDLHKLDIRSYDRIDAIQPWYSDKLYGGSNWTTPGWTGNTTGGTLKTLINPSDNPITRVKAQSSRTPNYIDFKFDTGGDNPSYGRYISGSVSHKEDIFEYPHQKLSQVHAFNKSTYPGFEGIDAVVFGFVDKNLNESSTYLMTNMITAIPAAKYNRGMSNFQPQVESIHAKQKAMKTDTTNSYLAYGVEVSKEQEYKIRYKVAANDNSKISLSNRKPGGNYVKIADTTIPITGNFADAVKGEYGSYKIVEGPTVKLTKGTHDLKLENSQGKFSIDQIELEPVEQDQVIAQDNFDDKRLSWVNFGGIVNGGVNGKAGMIDTNGNTWAYIQDQLLPFSKYTLSIKVKLNSTNGNERQNVTIYTDNMKRERITKTVELKGNAGYQEIQLDFITRRDLANTHVGILTSNGTSNILFDDVKVIGAKK

SEQ ID NO: 220 - protein, 668 aa, Artificial sequence
  Variant of native sequence
MTNKHKKIISMTLATGVFAGTYIPTAYTAFAETEPKEDLNEKQTKNINQNNPSIDLKGWFENPYKGVTFDQFINAFNNNAWNPLLVDLKNSGNAGSGTLVFLKGMMGTGLSLLPPPASLLGSVWNIFMPSTNGGTDMWKQLETYIEEKIDSKINDYHKYLMGAEFNGAMQYIKEYQRVLQIYNDSKNSLKRVEAPGTAVITAARNADTALKAFIAIIQTPEKETDSVYQQITAPIFVQAANAHLLLQRDMILYGKEWGMDTNQWQGYKDNQKKLIQEYTNYAMKVYNDGLEKKKKEAENINTQQPNRNTDRWNHINNYVREYTLSVLDFVDLFPATNPETYSKGLMQENSRQIYSSIKGAVIPQGGTGEGTTWENIQKILDSQAYTGDLHKLDIRSYDRIDAIQPWYSDKLYGGSNWTTPGWTGNTTGGTLKTLINPSDNPITRVKAQSSRTPNYIDFKFDTGGDNPSYGRYISGSVSHKEDIFEYPHQKLSQVHAFNKSTYPGFEGIDAVVFGFVDKNLNESSTYLMTNMITAIPAAKYNRGMSNFQPQVESIHAKQKAMKTDTTNSYLAYGVEVSKEQEYKIRYKVAANDNSKISLSNRKPGGNYVKIADTTIPITGNFADAVKGEYGSYKIVEGPTVKLTKGTHDLKLENSQGKFSIDQIELEPV

SEQ ID NO: 221 - protein, 778 aa, Artificial sequence
  Variant of native sequence
METEPKEDLNEKQTKNINQNNPSIDLKGWFENPYKGVTFDQFINAFNNNAWNPLLVDLKNSGNAGSGTLVFLKGMMGTGLSLLPPPASLLGSVWNIFMPSTNGGTDMWKQLETYIEEKIDSKINDYHKYLMGAEFNGAMQYIKEYQRVLQIYNDSKNSLKRVEAPGTAVITAARNADTALKAFIAIIQTPEKETDSVYQQITAPIFVQAANAHLLLQRDMILYGKEWGMDTNQWQGYKDNQKKLIQEYTNYAMKVYNDGLEKKKKEAENINTQQPNRNTDRWNHINNYVREYTLSVLDFVDLFPATNPETYSKGLMQENSRQIYSSIKGAVIPQGGTGEGTTWENIQKILDSQAYTGDLHKLDIRSYDRIDAIQPWYSDKLYGGSNWTTPGWTGNTTGGTLKTLINPSDNPITRVKAQSSRTPNYIDFKFDTGGDNPSYGRYISGSVSHKEDIFEYPHQKLSQVHAFNKSTYPGFEGIDAVVFGFVDKNLNESSTYLMTNMITAIPAAKYNRGMSNFQPQVESIHAKQKAMKTDTTNSYLAYGVEVSKEQEYKIRYKVAANDNSKISLSNRKPGGNYVKIADTTIPITGNFADAVKGEYGSYKIVEGPTVKLTKGTHDLKLENSQGKFSIDQIELEPVEQDQVIAQDNFDDKRLSWVNFGGIVNGGVNGKAGMIDTNGNTWAYIQDQLLPFSKYTLSIKVKLNSTNGNERQNVTIYTDNMKRERITKTVELKGNAGYQEIQLDFITRRDLANTHVGILTSNGTSNILFDDVKVIGAKK

SEQ ID NO: 222 - protein, 638 aa, Artificial sequence
  Variant of native sequence
METEPKEDLNEKQTKNINQNNPSIDLKGWFENPYKGVTFDQFINAFNNNAWNPLLVDLKNSGNAGSGTLVFLKGMMGTGLSLLPPPASLLGSVWNIFMPSTNGGTDMWKQLETYIEEKIDSKINDYHKYLMGAEFNGAMQYIKEYQRVLQIYNDSKNSLKRVEAPGTAVITAARNADTALKAFIAIIQTPEKETDSVYQQITAPIFVQAANAHLLLQRDMILYGKEWGMDTNQWQGYKDNQKKLIQEYTNYAMKVYNDGLEKKKKEAENINTQQPNRNTDRWNHINNYVREYTLSVLDFVDLFPATNPETYSKGLMQENSRQIYSSIKGAVIPQGGTGEGTTWENIQKILDSQAYTGDLHKLDIRSYDRIDAIQPWYSDKLYGGSNWTTPGWTGNTTGGTLKTLINPSDNPITRVKAQSSRTPNYIDFKFDTGGDNPSYGRYISGSVSHKEDIFEYPHQKLSQVHAFNKSTYPGFEGIDAVVFGFVDKNLNESSTYLMTNMITAIPAAKYNRGMSNFQPQVESIHAKQKAMKTDTTNSYLAYGVEVSKEQEYKIRYKVAANDNSKISLSNRKPGGNYVKIADTTIPITGNFADAVKGEYGSYKIVEGPTVKLTKGTHDLKLENSQGKFSIDQIELEPV

SEQ ID NO: 223 - protein, 304 aa, Bacillus sp.
MERRSLFMAIVDLDAYLLALAKKVYAPFAPLVNRVNTSSLKVKNAESYGFEIKNNKPQGTMFMGEAALKNDTNETQTIKSDSFTKTITDSITLSVTNGIKTGIDISVGGKVFGIGVETSMSFEVSTSTTREQTSTEGVAYTVPSQEVVVPAKKTYYVYCALQRSQLEGSIRLRADLSDRFMVMMKVQDLEAPIYNGDIYDFVKQHQSLHPLPSGISLNHNDKSIHFEGVAEYIYGTGTKFNVTITDTPSSQGTQEHKPFDAKTGLGTYELQLDGKKLGFDLNDLKDQMEPGVFEKLKELQNEIV

SEQ ID NO: 224 - protein, 297 aa, Artificial sequence
  Variant of native sequence
MAIVDLDAYLLALAKKVYAPFAPLVNRVNTSSLKVKNAESYGFEIKNNKPQGTMFMGEAALKNDTNETQTIKSDSFTKTITDSITLSVTNGIKTGIDISVGGKVFGIGVETSMSFEVSTSTTREQTSTEGVAYTVPSQEVVVPAKKTYYVYCALQRSQLEGSIRLRADLSDRFMVMMKVQDLEAPIYNGDIYDFVKQHQSLHPLPSGISLNHNDKSIHFEGVAEYIYGTGTKFNVTITDTPSSQGTQEHKPFDAKTGLGTYELQLDGKKLGFDLNDLKDQMEPGVFEKLKELQNEIV

SEQ ID NO: 225 - protein, 284 aa, Artificial sequence
  Variant of native sequence
MKKVYAPFAPLVNRVNTSSLKVKNAESYGFEIKNNKPQGTMFMGEAALKNDTNETQTIKSDSFTKTITDSITLSVTNGIKTGIDISVGGKVFGIGVETSMSFEVSTSTTREQTSTEGVAYTVPSQEVVVPAKKTYYVYCALQRSQLEGSIRLRADLSDRFMVMMKVQDLEAPIYNGDIYDFVKQHQSLHPLPSGISLNHNDKSIHFEGVAEYIYGTGTKFNVTITDTPSSQGTQEHKPFDAKTGLGTYELQLDGKKLGFDLNDLKDQMEPGVFEKLKELQNEIV

SEQ ID NO: 226 - protein, 334 aa, Bacillus sp.
MKSIKSKILVAAAIASVGTSFAIASPGLTKADSINPNSFEKQQLSVTPNYVSPEREDVQGFEDYLTANDTLLTTLQDFTNWNVKKFMGAQFIYSKLPSYSVEVVPNTKKDEELSSPEFVGTSELSHTGGTSEQTLYSSGFSKAIAASVTSTTTHGAKVGGKAGGKLKLPIVAEGGVELSAEYNFAHAETKTDSDLVTYTVPSQPVKLKPNERAVVTATLKMMESTGDVKLRTAYSGEITAYYKNLSDINKEHSELMGNWVKTLLNQKENQALNGILDYSRTDPNVAYLDGKGTYKAKYGSKMIIKVEIFQKNTRTADSTPIRSYSYETTPEIKQ

SEQ ID NO: 227 - protein, 304 aa, Artificial sequence
  Variant of native sequence
MDSINPNSFEKQQLSVTPNYVSPEREDVQGFEDYLTANDTLLTTLQDFTNWNVKKFMGAQFIYSKLPSYSVEVVPNTKKDEELSSPEFVGTSELSHTGGTSEQTLYSSGFSKAIAASVTSTTTHGAKVGGKAGGKLKLPIVAEGGVELSAEYNFAHAETKTDSDLVTYTVPSQPVKLKPNERAVVTATLKMMESTGDVKLRTAYSGEITAYYKNLSDINKEHSELMGNWVKTLLNQKENQALNGILDYSRTDPNVAYLDGKGTYKAKYGSKMIIKVEIFQKNTRTADSTPIRSYSYETTPEIKQ

SEQ ID NO: 228 - protein, 298 aa, Artificial sequence
  Variant of native sequence
MAIFDLDAYLVALAKKYYPDIFSQFISRVDTSFLAVKNAESYGFEIKNSKPQGTMFIGESVLKNDTNETQTIHSDSFTKTITDSVTLSVTTGITTGIDISIGGKIFGMGVETSMSFEVSTSTTNEQTSEESVAYTVPSQPVVVPAKKTYYVHTSLQRSQLEGSIRLRADLSGPFSVYMKMNGTEMPLGSHSLYDFIKEHQSLHPLPSGISLNHNNKSVHFEGIAEYIFGTGTKFYVTITDTPSSQGTQEHKAYDAKTGLGTYEIDLDGKKLGFALNDLKDKLEPEAFEKLKELQNEIV

SEQ ID NO: 229 - protein, 296 aa, Artificial sequence
  Variant of native sequence
MAIFDFDAYLLALANKVFPLPWISRVDTSNLSVKNAESYGFEIKNSKPQGTMFIGESVLTNNTNETQTIKSDSFTKTITDSITLSVTNGIKTGIDISIGGKVFGMGVETSMSFEVSTSTTREQTSTESVAYTVPSQDVVVPPQSKRYVYTSLQRSQLEGIIRLRADLSGLFVGYIKWDSGEESPIVGGDIYQYINTNQLLHPLPSGISLKHQDKAIHFEGVAEYIYGTGTKFYVTITDTPSSQGTLEQKPFDTKTGLGTYEIDLDGKKLGFDLNDLKDQMEPGVFEKLKELQNEIV

That which is claimed is:

1. A recombinant polypeptide having pesticidal activity, comprising
(a) a polypeptide comprising an amino acid sequence having at least 90% percent sequence identity to an amino acid sequence selected from the group consisting of sequences set forth in SEQ ID NOs: 5, 10, 24, 27, 40, 41, 45, 47, 49, 51, 52, 56, 59, 62, 64, 67, 77, 79, 80, 87, 92, 100, 102, 108, 111, 124, 129, 131, 132, 134, 136, 140, 148, 151, 156, 157, 159, 162, 164, 167, 172, 180, 181, 185, 199, 204, 208, 3, 7, 25, 28, 41, 49, 62, 79, 126, 132, 140, 172, 177, 180, 185, 191, or 199; or,
(b) a polypeptide comprising the amino acid sequence set forth in SEQ ID NOs: 5, 10, 24, 27, 40, 41, 45, 47, 49, 51, 52, 56, 59, 62, 64, 67, 77, 79, 80, 87, 92, 100, 102, 108, 111, 124, 129, 131, 132, 134, 136, 140, 148, 151, 156, 157, 159, 162, 164, 167, 172, 180, 181, 185, 199, 204, 208, 3, 7, 25, 28, 41, 49, 62, 79, 126, 132, 140, 172, 177, 180, 185, 191, or 199.

2. The polypeptide of claim 1, further comprising a heterologous amino acid sequence.

3. A composition comprising the polypeptide of claim 1.

4. A recombinant nucleic acid molecule encoding an amino acid sequence comprising
(a) at least 90% percent sequence identity to an amino acid sequence selected from the group consisting of sequences set forth in SEQ ID Nos: 5, 10, 24, 27, 40, 41, 45, 47, 49, 51, 52, 56, 59, 62, 64, 67, 77, 79, 80, 87, 92, 100, 102, 108, 111, 124, 129, 131, 132, 134, 136, 140, 148, 151, 156, 157, 159, 162, 164, 167, 172, 180, 181, 185, 199, 204, 208, 3, 7, 25, 28, 41, 49, 62, 79, 126, 132, 140, 172, 177, 180, 185, 191, or 199; or
(b) the amino acid sequence set forth in SEQ ID NOs: 5, 10, 24, 27, 40, 41, 45, 47, 49, 51, 52, 56, 59, 62, 64, 67, 77, 79, 80, 87, 92, 100, 102, 108, 111, 124, 129, 131, 132, 134, 136, 140, 148, 151, 156, 157, 159, 162, 164, 167, 172, 180, 181, 185, 199, 204, 208, 3, 7, 25, 28, 41, 49, 62, 79, 126, 132, 140, 172, 177, 180, 185, 191, or 199;
wherein said recombinant nucleic acid molecule is not a naturally occurring sequence encoding said polypeptide.

5. The recombinant nucleic acid of claim 4, wherein said nucleic acid molecule is a synthetic sequence designed for expression in a plant.

6. The recombinant nucleic acid molecule of claim 4, wherein said nucleic acid molecule is operably linked to a promoter capable of directing expression in a plant cell.

7. The recombinant nucleic acid molecule of claim 4, wherein said nucleic acid molecule is operably linked to a promoter capable of directing expression in a bacteria.

8. A host cell comprising the recombinant nucleic acid molecule of claim 4.

9. The host cell of claim 8, wherein said host cell is a bacterial host cell.

10. A DNA construct comprising a promoter that drives expression in a plant cell operably linked to a recombinant nucleic acid molecule comprising a nucleotide sequence that encodes a polypeptide comprising an amino acid sequence having at least 90% percent sequence identity to an amino acid sequence selected from the group consisting of sequences set forth in SEQ ID NOs: 5, 10, 24, 27, 40, 41, 45, 47, 49, 51, 52, 56, 59, 62, 64, 67, 77, 79, 80, 87, 92, 100, 102, 108, 111, 124, 129, 131, 132, 134, 136, 140, 148, 151, 156, 157, 159, 162, 164, 167, 172, 180, 181, 185, 199, 204, 208, 3, 7, 25, 28, 41, 49, 62, 79, 126, 132, 140, 172, 177, 180, 185, 191, or 199.

11. The DNA construct of claim 10, wherein said nucleotide sequence is a synthetic DNA sequence designed for expression in a plant.

12. A vector comprising the DNA construct of claim 10.

13. A host cell comprising the vector of claim 12.

14. A composition comprising the host cell of claim 13.

15. The composition of claim 14, wherein said composition is selected from the group consisting of a powder, dust, pellet, granule, spray, emulsion, colloid, and solution.

16. The composition of claim 15, wherein said composition comprises from about 1% to about 99% by weight of said polypeptide.

17. A method for controlling a pest population comprising contacting said pest population with a pesticidal-effective amount of the composition of claim 3.

18. A method for producing a polypeptide with pesticidal activity comprising culturing the host cell of claim 13 under conditions in which the nucleic acid molecule encoding the polypeptide is expressed.

19. A plant having stably incorporated into its genome a DNA construct comprising a nucleotide sequence that encodes a protein having pesticidal activity, wherein said nucleotide sequence comprise
(a) a nucleotide sequence that encodes a polypeptide comprising the amino acid sequence of any one of SEQ ID NOs: 5, 10, 24, 27, 40, 41, 45, 47, 49, 51, 52, 56, 59, 62, 64, 67, 77, 79, 80, 87, 92, 100, 102, 108, 111, 124, 129, 131, 132, 134, 136, 140, 148, 151, 156, 157, 159, 162, 164, 167, 172, 180, 181, 185, 199, 204, 208, 3, 7, 25, 28, 41, 49, 62, 79, 126, 132, 140, 172, 177, 180, 185, 191, or 199; or
(b) a nucleotide sequence that encodes a polypeptide comprising an amino acid sequence having at least 90% percent sequence identity to an amino acid sequence selected from the group consisting of sequences set forth in SEQ ID NOs: 5, 10, 24, 27, 40, 41, 45, 47, 49, 51, 52, 56, 59, 62, 64, 67, 77, 79, 80, 87, 92, 100, 102, 108, 111, 124, 129, 131, 132, 134, 136, 140, 148, 151, 156, 157, 159, 162, 164, 167, 172, 180, 181, 185, 199, 204, 208, 3, 7, 25, 28, 41, 49, 62, 79, 126, 132, 140, 172, 177, 180, 185, 191, or 199.

20. A transgenic seed of the plant of claim 19.

21. A method for protecting a plant from an insect pest, comprising expressing in a plant or cell thereof a nucleotide sequence that encodes a pesticidal polypeptide, wherein said nucleotide sequence comprising
(a) a nucleotide sequence that encodes a polypeptide comprising the amino acid sequence of any one of SEQ ID NOs: 5, 10, 24, 27, 40, 41, 45, 47, 49, 51, 52, 56, 59, 62, 64, 67, 77, 79, 80, 87, 92, 100, 102, 108, 111, 124, 129, 131, 132, 134, 136, 140, 148, 151, 156, 157, 159, 162, 164, 167, 172, 180, 181, 185, 199, 204, 208, 3, 7, 25, 28, 41, 49, 62, 79, 126, 132, 140, 172, 177, 180, 185, 191, or 199; or
(b) a nucleotide sequence that encodes a polypeptide comprising an amino acid sequence having at least 90% percent sequence identity to an amino acid sequence selected from the group consisting of sequences set forth in SEQ ID NOs: 5, 10, 24, 27, 40, 41, 45, 47, 49, 51, 52, 56, 59, 62, 64, 67, 77, 79, 80, 87, 92, 100, 102, 108, 111, 124, 129, 131, 132, 134, 136, 140, 148, 151, 156, 157, 159, 162, 164, 167, 172, 180, 181, 185, 199, 204, 208, 3, 7, 25, 28, 41, 49, 62, 79, 126, 132, 140, 172, 177, 180, 185, 191, or 199.

22. The method of claim 21, wherein said plant produces a pesticidal polypeptide having pesticidal activity against at least one of a lepidopteran pest, a coleopteran pest, or a hemipteran pest.

23. A method for increasing yield in a plant comprising growing in a field a plant or seed thereof having stably incorporated into its genome a DNA construct comprising a promoter that drives expression in a plant operably linked to a nucleotide sequence that encodes a pesticidal polypeptide, wherein said nucleotide sequence comprises
(a) a nucleotide sequence that encodes a polypeptide comprising the amino acid sequence of any one of SEQ ID NOs: 5, 10, 24, 27, 40, 41, 45, 47, 49, 51, 52, 56, 59, 62, 64, 67, 77, 79, 80, 87, 92, 100, 102, 108, 111, 124, 129, 131, 132, 134, 136, 140, 148, 151, 156, 157, 159, 162, 164, 167, 172, 180, 181, 185, 199, 204, 208, 3, 7, 25, 28, 41, 49, 62, 79, 126, 132, 140, 172, 177, 180, 185, 191, or 199; or
(b) a nucleotide sequence that encodes a polypeptide comprising an amino acid sequence having at least 90% percent sequence identity to an amino acid sequence selected from the group consisting of sequences set forth in SEQ ID NOs: 5, 10, 24, 27, 40, 41, 45, 47, 49, 51, 52, 56, 59, 62, 64, 67, 77, 79, 80, 87, 92, 100, 102, 108, 111, 124, 129, 131, 132, 134, 136, 140, 148, 151, 156, 157, 159, 162, 164, 167, 172, 180, 181, 185, 199, 204, 208, 3, 7, 25, 28, 41, 49, 62, 79, 126, 132, 140, 172, 177, 180, 185, 191, or 199.
